(19) United States
(12) Patent Application Publication
(10) Pub. No.: US 2025/0011392 A1
(43) Pub. Date: Jan. 9, 2025

(54) COLLAGEN COMPOSITIONS AND METHODS OF USE THEREOF

(71) Applicant: Modern Meadow, Inc., Nutley, NJ (US)

(72) Inventors: Lixin DAI, Nutley, NJ (US); Dale L HANDLIN, Jr., Nutley, NJ (US); Stanley LUE, Nutley, NJ (US); Monique DE LEEUW, Nutley, NJ (US); Dan DUEPPEN, Nutley, NJ (US); Dave WILLIAMSON, Nutley, NJ (US); Isabelle HANSENNE-CERVANTES, Nutley, NJ (US); Brenna RAUW, Nutley, NJ (US)

(21) Appl. No.: 18/557,244

(22) PCT Filed: Apr. 29, 2022
(86) PCT No.: PCT/US2022/027016

§ 371 Date: Oct. 25, 2023

Related U.S. Application Data
(63) Continuation-in-part of application No. PCT/US2021/030180, filed on Apr. 30, 2021.
(60) Provisional application No. 63/278,849, filed on Nov. 12, 2021.
(60) Provisional application No. 63/278,827, filed on Nov. 12, 2021.
(60) Provisional application No. 63/209,745, filed on Jun. 11, 2021.

(51) Int. Cl. C07K 14/78; A61K 8/65; A61K 38/00; A61Q 19/00; C12N 15/81

(52) U.S. Cl. CPC C07K 14/78; A61K 8/65; A61Q 19/00; C12N 15/815; A61K 38/00

(57) ABSTRACT

The present disclosure relates to a recombinant collagen, peptide fragments thereof, and sequence variants thereof. A novel Pichia pastoris strain for producing the recombinant collagen, fragments thereof, and sequence variants thereof, and methods of using the recombinant collagen, fragments, and sequence variants thereof are also provided. The present disclosure fulfills a need for environmentally friendly and safe alternatives for skincare.

### REFERENCE TO SEQUENCE LISTING SUBMITTED ELECTRONICALLY

[0001] The content of the electronically submitted sequence listing in ASCII text file (Name: 4431_082PC04_Seglisting_ST25; Size: 841,608; and Date of Creation: Apr. 27, 2022) filed with the application is incorporated herein by reference in its entirety.

### BACKGROUND

[0002] Collagen is one of the most important proteins in the human body, and is present in connective tissue such as cartilage, bones, tendons, ligaments, and skin, and it is the major protein in the extra-cellular matrix of human cells. “Recombinant collagen” refers to the family of at least 28 distinct naturally occurring collagen types prepared using recombinant techniques.

[0003] There are many known uses for collagen. In the cosmetics and skincare industry, for example, skincare compositions that include collagen can be used to combat the effects of aging and environmental stress on the appearance, elasticity, and thickness of skin. For example, ageing and environmental factors can lead to dermatological conditions including, but not limited to fine lines, wrinkles, dry skin, excessive pore size, skin dyschromia, reduced elasticity, unwanted hair, skin thinning, purpura, actinic keratosis, pruritus, eczema, acne, rosacea, erythema, telangiectasia, actinic telangiectasia, skin cancer, and rhinophyma. Although there are numerous skincare products on the market to improve skin appearance, many consumers are hesitant to use chemically-synthesized products they perceive as being environmentally unfriendly or otherwise unsafe.

### BRIEF SUMMARY

[0004] In some embodiments, the present disclosure provides a recombinant collagen fragment having a molecular weight of about 50 kDa and a sequence identity of at least about 85% to the amino acid sequence set forth in SEQ ID NO: 986. In some embodiments, the recombinant collagen fragment is unhydroxylated. In some embodiments, the recombinant collagen fragment is hydroxylated. In some embodiments, collagen fragment has the amino acid sequence set forth in SEQ ID NO: 986.

[0005] In some embodiments, the present disclosure provides a sequence variant of a recombinant collagen fragment having a molecular weight of about 50 kDa and a sequence identity of at least about 85% to the amino acid sequence set forth in SEQ ID NO: 986, wherein the sequence variant comprises the amino acid sequence set forth in any one of SEQ ID NOs: 987-1015. In some embodiments, the sequence variant is unhydroxylated. In some embodiments, the sequence variant is hydroxylated.

[0006] In some embodiments, the present disclosure provides a composition comprising a recombinant collagen fragment having a molecular weight of about 50 kDa and a sequence identity of at least about 85% to the amino acid sequence set forth in SEQ ID NO: 986. In some embodiments, the present disclosure provides a composition comprising a sequence variant of a recombinant collagen fragment having a molecular weight of about 50 kDa and a sequence identity of at least about 85% to the amino acid sequence set forth in SEQ ID NO: 986, wherein the sequence variant comprises the amino acid sequence set forth in any one of SEQ ID NOs: 987-1015. In some embodiments, the composition further comprises one or more peptides formed from the hydrolyzation of the collagen fragment having the amino acid sequence set forth in SEQ ID NO: 986. In some embodiments, at least one of the one or more peptides formed from the hydrolyzation of the collagen fragment having the amino acid sequence set forth in SEQ ID NO: 986 has an amino acid sequence according to one of SEQ ID NOs: 2-972. In some embodiments, the composition further comprises a pharmaceutically acceptable or cosmetically acceptable excipient.

[0007] In some embodiments, the present disclosure provides a method of producing comprising a recombinant collagen fragment having a molecular weight of about 50 kDa and a sequence identity of at least about 85% to the amino acid sequence set forth in SEQ ID NO: 986, comprising producing the recombinant collagen fragment in a genetically engineered strain of yeast. In some embodiments, the yeast is Pichia pastoris. In some embodiments, the yeast has been transformed with a plasmid comprising the nucleic acid sequence set forth in SEQ ID NO: 973. In some embodiments, the yeast is a yeast that has been transformed with a plasmid comprising the nucleic acid sequence set forth in SEQ ID NO: 974.

[0008] In some embodiments, the method comprises: (i) fermenting a genetically engineered yeast in a fermentation broth; (ii) recovering from the fermentation broth recombinant collagen fragments secreted by the genetically engineered yeast; and (iii) optionally, purifying the recombinant collagen fragments. In some embodiments, the method further comprises hydroxylating the recombinant collagen fragment ex vivo.

[0009] In some embodiments, the present disclosure provides a method of producing the sequence variant disclosed herein, comprising producing the recombinant collagen fragment in a genetically engineered strain of yeast. In some embodiments, the yeast is Pichia pastoris. In some embodiments, the yeast has been transformed with a plasmid comprising the nucleic acid sequence set forth in any one of SEQ ID NO: 1045-1073.

[0010] In some embodiments, the method comprises: (i) fermenting a genetically engineered yeast in a fermentation broth; (ii) recovering from the fermentation broth recombinant collagen fragment sequence variants secreted by the genetically engineered yeast; and (iii) optionally, purifying the recombinant collagen fragments.

[0011] In some embodiments, the method further comprises hydroxylating the recombinant collagen sequence variant ex vivo.

[0012] In some embodiments, the present disclosure provides a strain of yeast genetically engineered to produce the recombinant collagen fragment described herein, wherein the strain of yeast comprises a vector comprising a DNA sequence encoding the recombinant collagen.

[0013] In some embodiments, the present disclosure provides a strain of yeast genetically engineered to produce the sequence variants described herein, wherein the strain of yeast comprises a vector comprising a DNA sequence encoding the variant.

[0014] The strain of yeast of claim 24, wherein the vector comprises a nucleic acid sequence comprising the DNA sequence set forth in SEQ ID NO: 973. In some embodiments, the strain of yeast further comprises a second vector comprising a nucleic acid sequence comprising the DNA sequence set forth in SEQ ID NO: 974. In some embodiments, the vector comprises a nucleic acid sequence comprising the DNA sequence set forth in any one of SEQ ID NO: 1045-1073. In some embodiments, the strain of yeast described herein is a Pichia pastoris.

[0015] In some embodiments, the present disclosure provides a method of treating a dermatological condition comprising administering an effective amount of the recombinant collagen fragment having a molecular weight of about 50 kDa and a sequence identity of at least about 85% to the amino acid sequence set forth in SEQ ID NO: 986, described herein, or the sequence variants thereof, to a subject in need thereof.

[0016] In some embodiments, the present disclosure provides a method of treating a dermatological condition comprising administering an effective amount of the composition described herein to a subject in need thereof. In some embodiments, the dermatological condition comprises fine lines, wrinkles, dry skin, excessive pore size, skin dyschromia, reduced elasticity, unwanted hair, skin thinning, purpura, actinic keratosis, pruritus, eczema, acne, rosacea, erythema, telangiectasia, actinic telangiectasia, skin cancer, or rhinophyma. In some embodiments, the composition is topically administered to an area of skin. In some embodiments, the area of skin is selected from the group consisting of a facial surface, scalp, neck, ears, shoulders, chest (including breasts and/or the decolletage), arms, hands, legs, stomach, buttocks, groin, back, feet, and combinations thereof.

[0017] In some embodiments, the present disclosure provides a method of increasing collagen production in cells, comprising administering an effective amount of the recombinant collagen fragment having a molecular weight of about 50 kDa and a sequence identity of at least about 85% to the amino acid sequence set forth in SEQ ID NO: 986, described herein, or the sequence variants thereof, to the cells. In some embodiments, the method increases the production of Type I collagen. In some embodiments, the cells are fibroblasts. In some embodiments, the cells are cultured cells. In some embodiments, the fragment or variant is formulated in a composition. In some embodiments, the fragment has an amino acid sequence set forth in SEQ ID NO: 986. In some embodiments, the sequence variant has an amino acid sequence set forth in any one of SEQ ID NOs: 987-1015.

[0018] In some embodiments, the present disclosure provides a skincare product comprising the composition described herein, for use in reducing the appearance of wrinkles, evening skin tone, providing moisture, reducing the appearance of dark circles under the eyes, increasing the collagen content of skin, increasing skin density, improving skin firmness and elasticity, improving the appearance of lines and wrinkles, smoothing the skin texture, increasing skin radiance and luminosity, improving the appearance of sagging skin, whitening the skin, or any combination thereof.

[0019] In some embodiments, the present disclosure provides a method of treating a wound in a human subject in need thereof, the method comprising applying the composition described herein to the wound on the subject, wherein applying the recombinant collagen fragment induces the production of human Type I collagen, human Type III collagen, or a combination thereof. In some embodiments, the collagen fragment is topically applied to the wound.

[0020] In some embodiments, the present disclosure provides a recombinant collagen fragment having a molecular weight of about 50 kDa and a sequence identity of at least about 85% to the amino acid sequence set forth in SEQ ID NO: 1 or SEQ ID NO: 986. In some embodiments, the recombinant collagen fragment can be unhydroxylated. In some embodiments, the recombinant collagen fragment can be hydroxylated. In some embodiments, the collagen fragment can have the amino acid sequence set forth in SEQ ID NO: 1 or SEQ ID NO: 986. In some embodiments, the present disclosure provides a recombinant collagen fragment comprising an amino acid sequence according to any one of SEQ ID NOs: 2-972.

[0021] In some embodiments, the present disclosure provides a composition comprising a recombinant collagen fragment described herein. In some embodiments, the composition further comprises one or more peptides formed from hydrolysis of the collagen fragment having the amino acid sequence set forth in SEQ ID NO: 1 or from hydrolysis of the collagen fragment having the amino acid sequence set forth in SEQ ID NO: 986.

[0022] In some embodiments of the present disclosure, at least one of the one or more peptides formed from hydrolysis of the collagen fragment having the amino acid sequence set forth in SEQ ID NO: 1 has an amino acid sequence according to one of SEQ ID NOs: 2-972. In some embodiments of the present disclosure, at least one of the one or more peptides formed from hydrolysis of the collagen fragment having the amino acid sequence set forth in SEQ ID NO: 986 has an amino acid sequence according to one of SEQ ID NOs: 2-972. In some embodiments, the composition further comprises a pharmaceutically acceptable or cosmetically acceptable excipient.

[0023] In some embodiments, the present disclosure provides a method of producing the recombinant collagen fragment comprising producing the recombinant collagen fragment in a genetically engineered strain of yeast. In some embodiments, the yeast can be Pichia pastoris. In some embodiments, the yeast can be transformed with a plasmid comprising the nucleic acid sequence set forth in SEQ ID NO: 973. In some embodiments, the yeast can be a yeast that has been further transformed with a plasmid comprising the nucleic acid sequence set forth in SEQ ID NO: 974. In some embodiments, the method comprises: (i) fermenting a genetically engineered yeast in a fermentation broth; (ii) recovering from the fermentation broth recombinant collagen fragments secreted by the genetically engineered yeast; and (iii) optionally, purifying the recombinant collagen fragments. In some embodiments, the method further comprises hydroxylating the recombinant collagen fragments ex vivo.

[0024] In some embodiments, the present disclosure provides a strain of yeast genetically engineered to produce the recombinant collagen fragment described herein, wherein the strain of yeast comprises a vector comprising a DNA sequence encoding the recombinant collagen. In some embodiments, the vector comprises a nucleic acid sequence comprising the DNA sequence set forth in SEQ ID NO: 973. In some embodiments, the strain of yeast described herein further comprises a second vector comprising a nucleic acid sequence comprising the DNA sequence set forth in SEQ ID NO: 974. In some embodiments, the strain of yeast can be Pichia pastoris.

[0025] In some embodiments, the present disclosure provides a method of treating a dermatological condition comprising administering an effective amount of the recombinant collagen fragment described herein to a subject in need thereof. In some embodiments, the present disclosure provides a method of treating a dermatological condition comprising administering an effective amount of the composition disclosed herein to a subject in need thereof. In some embodiments, the dermatological condition can be fine lines, wrinkles, dry skin, excessive pore size, skin dyschromia, reduced elasticity, unwanted hair, skin thinning, purpura, actinic keratosis, pruritus, eczema, acne, rosacea, erythema, telangiectasia, actinic telangiectasia, skin cancer, or rhinophyma. In some embodiments, the composition can be topically administered to an area of skin. In some embodiments, the area of skin can be selected from the group consisting of a facial surface, scalp, neck, ears, shoulders, chest (including breasts and/or the decolletage), arms, hands, legs, stomach, buttocks, groin, back, feet, and combinations thereof.

[0026] In some embodiments, the present disclosure provides a method of increasing collagen production in cells, comprising administering an effective amount of the recombinant collagen fragment described herein to the cells. In some embodiments, the method can increase the production of Type I collagen. In some embodiments, the method can increase the production of Type III collagen. In some embodiments, the cells can be fibroblasts. In some embodiments, the cells can be cultured cells.

[0027] In some embodiments of the methods disclosed herein, the fragment can be formulated in a composition. In some embodiments, the fragment can have an amino acid sequence according to SEQ ID NO: 1, or SEQ ID NO: 986.

[0028] In some embodiments, the present disclosure provides a skincare product comprising the composition described herein, for use in reducing the appearance of wrinkles, evening skin tone, providing moisture, reducing the appearance of dark circles under the eyes, increasing the collagen content of skin, increasing skin density, improving skin firmness and elasticity, improving the appearance of lines and wrinkles, smoothing the skin texture, increasing skin radiance and luminosity, improving the appearance of sagging skin, whitening the skin, or any combination thereof.

[0029] In some embodiments the present disclosure provides methods of treating a wound in a human subject in need thereof, the method comprising applying a composition comprising a recombinant collagen fragment disclosed herein to the wound on the subject, wherein applying the recombinant collagen fragment induces the production of human Type I collagen, human Type III collagen, or a combination thereof. In certain embodiments of these methods, the collagen fragment is topically applied to the wound.

### BRIEF DESCRIPTION OF THE FIGURES

[0030] FIG. 1 shows the vector diagram of Vector A, a plasmid encoding a 50 kDa fragment of human collagen III, with zeocin resistance.

[0031] FIG. 2 shows the vector diagram of Vector B, a plasmid encoding a 50 kDa fragment of human collagen III, N-acetyl transferase, and beta-lactamase.

[0032] FIG. 3A shows the biomass density curve of a yeast culture expressing a 50 kDa fragment of human collagen, as detected by optical density measurements at 600 nm. The X-axis is fermentation time in hours. The Y-axis is the biomass density.

[0033] FIG. 3B shows the biomass density curve of a yeast culture expressing a 50 kDa fragment of human collagen, as detected by wet cell weight measurements. The X-axis is fermentation time in hours. The Y-axis is the wet cell weight.

[0034] FIG. 3C shows the glycerol concentration of a yeast culture expressing a 50 kDa fragment of human collagen, relative to the fermentation time of the culture. The X-axis is fermentation time in hours. The Y-axis is the glycerol concentration.

[0035] FIG. 3D shows the carbon dioxide evolution rate (CER) of a yeast culture expressing a 50 kDa fragment of human collagen, relative to the fermentation time of the culture. The X-axis is fermentation time in hours. The Y-axis is the CER.

[0036] FIG. 4 shows the abundance of various-sized peptides generated from hydrolyzation of a 50 kDa fragment of human collagen, as detected by mass spectrometry analysis. The analysis showed that a range of peptides appears after incubating one week at room temperature, and that the peptides present were equivalent after one and three weeks of incubation.

[0037] FIG. 5 shows a flow chart of the process to purify a unhydroxylated 50 kDa fragment of human collagen.

[0038] FIG. 6 shows a flow chart of the process to purify a hydroxylated 50 kDa fragment of human collagen.

[0039] FIG. 7 shows the percent recovery of a 50 kDa fragment of human collagen during individual steps of its purification process, and overall during all of the steps up to those individual steps.

[0040] FIG. 8 shows the percent hydroxylation of a 50 kDa fragment of human collagen achieved over time during an ex vivo hydroxylation reaction.

[0041] FIG. 9A and FIG. 9B show thermograms of 50 kDa collagen before and after hydroxylation, respectively. Hydroxylated 50 kDa collagen builds rheology and has improved thermal stability post hydroxylation.

[0042] FIG. 10 shows a circular dichroism spectra of hydroxylated 50 kDa collagen, which exhibits the signature profile expected for helical collagen.

[0043] FIG. 11A and FIG. 11B show the results of an MTT assay to measure the effects of a different collagen preparations, at a range of concentrations, on the viability of fibroblasts. None of the collagens were observed to impact cell viability.

[0044] FIG. 12A and FIG. 12B show the results of a type I collagen assay to detect the effects of different collagen and collagen fragment preparations to impact type I collagen synthesis in treated primary human dermal fibroblasts.

[0045] FIG. 13A and FIG. 13B show the results of a type III collagen assay to detect the effects of different collagen and collagen fragment preparations to impact type III collagen synthesis in treated primary human dermal fibroblasts.

[0046] FIG. 14 shows the measured solubility and character of collagen and collagen fragment solutions.

[0047] FIG. 15A and FIG. 15B show the results of an EpiOcular test conducted on Human Recombinant Collagen III and a 50 kDa fragment of human collagen

[0048] FIG. 16A provides the statistical result for each attribute objectively graded for Formulations 1 and 2.

[0049] FIGS. 16B and 16C provide the self-assessment questions and results for Formulations 1 and 2.

[0050] FIG. 16D shows the statistical results the levels of collagen within the skin both before and after 6 weeks of application of either Formulation 1 or 2.

[0051] FIGS. 17A-17H show the results of an MTT assay to measure the effects of a different collagen variant preparations, at a range of concentrations, on the viability of fibroblasts.

[0052] FIGS. 18A-18H show the results of a type I collagen assay to detect the effects of different collagen variant preparations to impact type I collagen synthesis in treated primary human dermal fibroblasts.

[0053] FIGS. 19A-19H show the results of a type III collagen assay to detect the effects of different collagen variant preparations to impact type III collagen synthesis in treated primary human dermal fibroblasts.

### DETAILED DESCRIPTION

### Definitions

[0054] The indefinite articles “a” and “an” to describe an element or component means that one or at least one of these elements or components is present. Although these articles are conventionally employed to signify that the modified noun is a singular noun, as used herein the articles “a” and “an” also include the plural, unless otherwise stated in specific instances. Similarly, the definite article “the,” as used herein, also signifies that the modified noun can be singular or plural, again unless otherwise stated in specific instances.

[0055] As used herein, the term “about” used with numerical values means “within 10% of the stated value,” unless expressly noted otherwise. For example, “about 5% by weight” means from 4.5% by weight to 5.5% by weight.

[0056] The term “modified,” as applied to the collagen fragments disclosed herein, refers to collagen fragments comprising an amino acid sequence that is at least 70%, 80%, 90%, 95%, or 99% identical or similar to the amino acid sequence of a biologically active molecule. In some embodiments, the modified collagen fragment comprises an amino acid sequence that is at least 75%, 80%, 85%, 86%, 87%, 88%, 89%, 90%, 91%, 92%, 93%, 94%, 95%, 96%, 97%, 98%, or 99% identical to the amino acid sequence of a native or previously engineered sequence. The modified sequence can comprise additions, deletions, substitutions, or a combination thereof to the amino acid sequence of a native or previously engineered molecule. For example, a modified collagen fragment can incorporate or delete 1, 2, 3, 4, 5, 6, 7, 8, 9, 10 or more amino acid residues compared to a native collagen sequence. Such selections can be made to modify the looseness or tightness of a recombinant collagen. The degree of hydroxylation of collagen correlates with the looseness or tightness of the collagen triple helix. A modified collagen fragment can also include chemical modifications to a polypeptide, such as crosslinks between cysteine residues, or hydroxylated or glycosylated residues. As used herein, the terms “variant” and “sequence variant” refer to a polypeptide sequence that is about 75% to about 99% identical to the amino acid sequence set forth in SEQ ID NO: 986.

[0057] The terms “pharmaceutically acceptable” and “cosmetically acceptable,” as applied to carriers, excipients, or stabilizers that may be used in the compositions described herein, refer to carriers, excipients, or stabilizers that are nontoxic to recipients at the dosages and concentrations employed.

[0058] As used herein, the term “tissue repair” refers to the restoration of tissue architecture and function after an injury in the context of the healing of damaged tissue. Tissue regeneration refers to a type of healing in which new growth restores portions of damaged tissue to a normal state.

### A. Collagen

[0059] The term “collagen” refers to any one of the known collagen types, including collagen types I through XX described below, as well as to any other collagens, whether natural, synthetic, semi-synthetic, or recombinant. The term collagen includes collagen, collagen fragments, collagen-like proteins, triple helical collagen, alpha chains, monomers, gelatin, trimers and combinations thereof. It includes all of the collagens, modified collagens and collagen-like proteins described herein. The term also encompasses procollagens and collagen-like proteins or collagenous proteins comprising the motif (Gly-X-Y)n where n is an integer. It encompasses molecules of collagen and collagen-like proteins, trimers of collagen molecules, fibrils of collagen, and fibers of collagen fibrils. It also refers to chemically, enzymatically or recombinantly-modified collagens or collagen-like molecules that can be fibrillated as well as fragments of collagen, collagen-like molecules and collagenous molecules capable of assembling into a nanofiber. Recombinant collagen molecules whether native or engineered will generally comprise a repeated -(Gly-X-Y)n- sequence.

[0060] As used herein, collagen is a generic term for a family of at least 28 distinct collagen types. Various distinct collagen types have been identified in a range of species, including bovine, ovine, porcine, chicken, marine, plant, and human collagens. Animal skin is typically Type I collagen, although other types of collagen can be used in forming leather including type III collagen. The term “collagen” encompasses unprocessed (e.g., procollagens) as well as post-translationally modified and proteolyzed collagens having a triple helical structure. Type I collagen is the major fibrillar collagen of bone and skin comprising approximately 80-90% of an organism's total collagen. Type I collagen is the major structural macromolecule present in the extracellular matrix of multicellular organisms and comprises approximately 20% of total protein mass. Type I collagen is a heterotrimeric molecule comprising two α1(I) chains and one α2(I) chain, encoded by the COL1A1 and COL1A2 genes, respectively. In vivo assembly of Type I collagen fibrils, fibers, and fiber bundles takes place during development and provides mechanical support to the tissue while allowing for cellular motility and nutrient transport. Other collagen types are less abundant than type I collagen and exhibit different distribution patterns. Type III collagen is a major fibrillar collagen found in skin and vascular tissues. Type III collagen is a homotrimeric collagen comprising three identical α1(III) chains encoded by the COL3A1 gene.

### B. Recombinant Collagen and Recombinant Collagen Fragments

[0061] As used herein, the term “recombinant collagen” refers to the family of at least 28 distinct naturally occurring collagen types including, but not limited to collagen types I through XXVIII, prepared using recombinant techniques.

[0062] In some embodiments, the recombinant collagen described herein is a recombinant collagen fragment. A recombinant collagen fragment can be a fragment of the full amino acid sequence of a native collagen molecule capable of forming tropocollagen (trimeric collagen) or the fragment can be a fragment of a modified collagen molecule or truncated collagen molecule having an amino acid sequence at least 70, 80, 90, 95, 96, 97, 98, or 99% identical or similar to a native collagen amino acid sequence (or to a fibril forming region thereof or to a segment substantially comprising [Gly-X-Y]n).

[0063] Exemplary collagen sequences from which fragments can be derived include amino acid sequences of Col1A1, Col1A2, and Col3A1, such as those described by Accession Nos. P02461.4 (SEQ ID NO: 982; human Col3A1) (www.ncbi.nlm.nih.gov/protein/124056490), NP_001029211.1 (SEQ ID NO: 978; bovine Col1A1) (www.ncbi.nlm.nih.gov/protein/77404252), NP_776945.1 (SEQ ID NO: 979; bovine Col1A2) (www.ncbi.nlm.nih.gov/protein/27806257) and NP_001070299.1 (SEQ ID NO: 980; bovine Col3A1) (www.ncbi.nlm.nih.gov/protein/116003881), which are incorporated herein by reference.

[0064] A gene encoding a collagen can be truncated or otherwise modified to add or remove sequences, for example to encode the collagen fragments disclosed herein. In addition, gene modifications can be made to customize the size of a polynucleotide or vector, to target the expressed protein to the endoplasmic reticulum or other cellular or extracellular compartment, or to control the length of an encoded protein. Modifications can be made to polynucleotides encoding collagen fragments. For example, a polynucleotide coding sequence for a collagen or collagen fragment can be modified to encode a protein that is at least 70, 80, 90, 95, 96, 97, 98, or 100% identical or similar to a known amino acid sequence. Such modifications can include codon-modifying or codon-optimizing a polynucleotide encoding a collagen fragment.

[0065] In some embodiments, the collagen fragment disclosed herein can have a molecular weight from about 40 kDa to about 60 kDa. In some embodiments, the collagen fragment can have a molecular weight of about 40 kDa, about 41 kDa, about 42 kDa, about 43 kDa, about 44 kDa, about 45 kDa, about 46 kDa, about 47 kDa, about 48 kDa, about 49 kDa, about 50 kDa, about 51 kDa, about 52 kDa, about 53 kDa, about 54 kDa, about 55 kDa, about 56 kDa, about 57 kDa, about 58 kDa, about 59 kDa, or about 60 kDa. In a particular embodiment, the collagen fragment can have a molecular weight of about 50 kDa.

[0066] In some embodiments, the collagen fragment described herein can have an amino acid chain length from about 350 amino acids to about 600 amino acids and can overlap with the amino acid sequence of SEQ ID NO: 1 or SEQ ID NO: 986. In some embodiments, the overlapping collagen fragment described herein can have a length of about 350 amino acids, about 370 amino acids, about 390 amino acids, about 400 amino acids, about 420 amino acids, about 440 amino acids, about 460 amino acids, about 480 amino acids, about 500 amino acids, about 510 amino acids, about 520 amino acids, about 530 amino acids, about 540 amino acids, about 550 amino acids, about 560 amino acids, about 570 amino acids, about 580 amino acids, about 590 amino acids, or about 600 amino acids.

[0067] In some embodiments, the collagen fragment described herein can have an amino acid sequence according to SEQ ID NO: 1 or SEQ ID NO: 986. In some embodiments, the collagen fragment can have at least about 70%, at least about 75%, at least about 80%, about 85%, at least about 87.5%, at least about 90%, at least about 92.5%, at least about 95%, at least about 97.5%, at least about 98%, at least about 99% or 100% sequence identity, or similarity to SEQ ID NO: 1. In some embodiments, the collagen fragment can have at least about 70%, at least about 75%, at least about 80%, at least about 85%, at least about 87.5%, at least about 90%, at least about 92.5%, at least about 95%, at least about 97.5%, at least about 98%, at least about 99% or 100% sequence identity, or similarity to SEQ ID NO: 986.

The amino acid sequence of SEQ ID NO: 1 is:
DVKSGVAVGGLAGYPGPAGPPGPPGPPGTSGHPGSPGSPGYQGPPGEPGQ
AGPSGPPGPPGAIGPSGPAGKDGESGRPGRPGERGLPGPPGIKGPAGIPG
FPGMKGHRGFDGRNGEKGETGAPGLKGENGLPGENGAPGPMGPRGAPGER
GRPGLPGAAGARGNDGARGSDGQPGPPGPPGTAGFPGSPGAKGEVGPAGS
PGSNGAPGQRGEPGPQGHAGAQGPPGPPGINGSPGGKGEMGPAGIPGAPG
LMGARGPPGPAGANGAPGLRGGAGEPGKNGAKGEPGPRGERGEAGIPGVP
GAKGEDGKDGSPGEPGANGLPGAAGERGAPGFRGPAGPNGIPGEKGPAGE
RGAPGPAGPRGAAGEPGRDGVPGGPGMRGMPGSPGGPGSDGKPGPPGSQG
ESGRPGPPGPSGPRGQPGVMGFPGPKGNDGAPGKNGERGGPGGPGPQGPP
GKNGETGPQGPPGPTGPGGDKGDTGPPGPQGLQGLPGTGGPPGENGKPGE
PGPKGDAGAPGAPGGKGDAGAPGERGPP.
The amino acid sequence of SEQ ID NO: 986 is:
DVKSGVAVGGLAGYPGPAGPPGPPGPPGTSGHPGSPGSPGYQGPPGEPGQ
AGPSGPPGPPGAIGPSGPAGKDGESGRPGRPGERGLPGPPGIKGPAGIPG
FPGMKGHRGFDGRNGEKGETGAPGLKGENGLPGENGAPGPMGPRGAPGER
GRPGLPGAAGARGNDGARGSDGQPGPPGPPGTAGFPGSPGAKGEVGPAGS
PGSNGAPGQRGEPGPQGHAGAQGPPGPPGINGSPGGKGEMGPAGIPGAPG
LMGARGPPGPAGANGAPGLRGGAGEPGKNGAKGEPGPRGERGEAGIPGVP
GAKGEDGKDGSPGEPGANGLPGAAGERGAPGFRGPAGPNGIPGEKGPAGE
RGAPGPAGPRGAAGEPGRDGVPGGPGMRGMPGSPGGPGSDGKPGPPGSQG
ESGRPGPPGPSGPRGQPGVMGFPGPKGNDGAPGKNGERGGPGGPGPQGPP
GKNGETGPQGPPGPTGPGGDKGDTGPPGPQGLQGLPGTGGPPGENGKPGE
PGPKGDAGAPGAPGGKGDAGAPGERGPPAIAGIGGEKAGGFAPYYG.

[0068] In some embodiments, the collagen fragment described herein can have an amino acid chain length from about 350 amino acids to about 600 amino acids and can have at least about 70%, at least about 75%, at least about 80%, at least about 85%, at least about 87.5%, at least about 90%, at least about 92.5%, at least about 95%, at least about 97.5%, at least about 98%, at least about 99% or 100% sequence identity, or similarity to, SEQ ID NO: 1 or SEQ ID NO: 986. In some embodiments, the such a collagen fragment described herein can have a length of about 350 amino acids, about 370 amino acids, about 390 amino acids, about 400 amino acids, about 420 amino acids, about 440 amino acids, about 460 amino acids, about 480 amino acids, about 500 amino acids, about 510 amino acids, about 520 amino acids, about 530 amino acids, about 540 amino acids, about 550 amino acids, about 560 amino acids, about 570 amino acids, about 580 amino acids, about 590 amino acids, or about 600 amino acids.

[0069] In some embodiments, the recombinant collagen can comprise a hydrolysis product of a collagen fragment, wherein the hydrolysis product can have a sequence that is a portion of SEQ ID NO: 1 or SEQ ID NO: 986. In some embodiments, the hydrolysis product can have a sequence according to one of SEQ ID NOs: 2-972.

[0070] In some embodiments, the lysine, proline, or lysine and proline residues present in the collagen fragment are not hydroxylated. In other embodiments, the collagen fragment described herein can be hydroxylated. In some embodiments, at least 1%, 2%, 3%, 4%, 5%, 10%, 15%, 20%, 30%, 40%, 50%, 60%, 70%, 80%, 90%, 95% or 100% (or any intermediate value or subrange) of the lysine, proline, or lysine and proline residues in the recombinant collagen fragment can be hydroxylated. Hydroxylating collagen can build rheology and improve thermal stability of a collagen molecule or fragment. Hydroxylated collagen and hydroxylated collagen fragments are also resistant to high concentration pepsin digestion, for example at a pepsin:total protein ratio of 1:25 to 1:1.

[0071] The degree of hydroxylation of proline, lysine or proline and lysine residues in a collagen fragment can be estimated by determining the melting temperature of a hydrated collagen, such as a hydrogel, and comparing the melting point of the hydrogel to a “control” collagen fragment having a known content of hydroxylated amino acid residues. Collagen melting temperatures can range from 25-40° C. with more highly hydroxylated collagens generally having higher melting temperatures.

[0072] In some embodiments, the collagen fragment described herein can have an amino acid sequence as set forth below in Table 1 or Table 2. In some embodiments, the collagen fragment can be a collagen fragment sequence variant having the amino acid Table 1.

TABLE 1

| SEQ | |
|---|---|
| ID | |
| NO. | Sequence |
| 1 | DVKSGVAVGGLAGYPGPAGPPGPPGPPGTSGHPGSPGSPGYQGPPGEPGQAGPSGPP |
| | GPPGAIGPSGPAGKDGESGRPGRPGERGLPGPPGIKGPAGIPGFPGMKGHRGFDGRN |
| | GEKGETGAPGLKGENGLPGENGAPGPMGPRGAPGERGRPGLPGAAGARGNDGARGSD |
| | GQPGPPGPPGTAGFPGSPGAKGEVGPAGSPGSNGAPGQRGEPGPQGHAGAQGPPGPP |
| | GINGSPGGKGEMGPAGIPGAPGLMGARGPPGPAGANGAPGLRGGAGEPGKNGAKGEP |
| | GPRGERGEAGIPGVPGAKGEDGKDGSPGEPGANGLPGAAGERGAPGFRGPAGPNGIP |
| | GEKGPAGERGAPGPAGPRGAAGEPGRDGVPGGPGMRGMPGSPGGPGSDGKPGPPGSQ |
| | GESGRPGPPGPSGPRGQPGVMGFPGPKGNDGAPGKNGERGGPGGPGPQGPPGKNGET |
| | GPQGPPGPTGPGGDKGDTGPPGPQGLQGLPGTGGPPGENGKPGEPGPKGDAGAPGAP |
| | GGKGDAGAPGERGPP |
| 2 | AAGARGNDGARGSDGQPGPPGPPGTA |
| 3 | AAGARGNDGARGSDGQPGPPGPPGTAGFPGSPGAK |
| 4 | AAGARGNDGARGSDGQPGPPGPPGTAGFPGSPGAKGEVGPA |
| 5 | AAGEPGRDGVPGGPGMRGMPG |
| 6 | AAGEPGRDGVPGGPGMRGMPGSPGGPG |
| 7 | AAGERGAPGFRGPAGPN |
| 8 | AGAQGPPGPPGIN |
| 9 | AGAQGPPGPPGINGSPGGKGEMGPAGIPGAPGLM |
| 10 | AGARGNDGARGSDGQPGPPGPPGTA |
| 11 | AGARGNDGARGSDGQPGPPGPPGTAGFPGSPGAKGEVGPA |
| 12 | AGEPGRDGVPGGPGMRGMPGSPGGPG |
| 13 | AGERGAPGFRGPAGPN |
| 14 | AGIPGAPGLM |
| 15 | AGIPGAPGLMGARGPPGPAGANGAPGLR |
| 16 | AGIPGFPGMKGH |
| 17 | AGIPGFPGMKGHRG |
| 18 | AGIPGFPGMKGHRGF |
| 19 | AGIPGFPGMKGHRGFDGRN |
| 20 | AGIPGFPGMKGHRGFDGRNGEKGETGAPGLK |
| 21 | AGIPGFPGMKGHRGFDGRNGEKGETGAPGLKGEN |
| 22 | AGKDGESGRPGRPGERGLPGPPGIK |
| 23 | AGKDGESGRPGRPGERGLPGPPGIKGPA |
| 24 | AGPPGPPGPPGTS |
| 25 | AGPPGPPGPPGTSGH |
| 26 | AGPSGPPGPPGAIGPS |
| 27 | AGPSGPPGPPGAIGPSGPAGKDGESGRPGRPGERGLPGPPGIK |
| 28 | AGSPGSNGAPGQRGEPGPQGHAGAQGPPGPPGINGSPGGKGEMGPAGIPGAPGLM |
| 29 | AGYPGPAGPPGPPGPPGTS |
| 30 | AGYPGPAGPPGPPGPPGTSGHPGSPGSPGYQGPPGEPGQAGPSGPPGPPGAIGPS |
| 31 | AIGPSGPAGKDGESGRPGRPGERGLPGPPGIK |
| 32 | AKGEVGPAGSPGSNGAPGQRGEPGPQG |
| 33 | AKGEVGPAGSPGSNGAPGQRGEPGPQGHAGAQGPPGPPGIN |
| 34 | ANGAPGLRGGAGEPGKNGAKGEPGPR |
| 35 | ANGLPGAAGERGAPGFRGPAGPN |
| 36 | APGERGRPGLPGAAGAR |
| 37 | APGERGRPGLPGAAGARGNDGARGSDGQPGPPGPPGTA |
| 38 | APGLKGENGLPGEN |
| 39 | APGLKGENGLPGENGAPGPMGPR |
| 40 | APGLMGARGPPGPA |
| 41 | APGLMGARGPPGPAGAN |
| 42 | APGLMGARGPPGPAGANGAPGLR |
| 43 | APGQRGEPGPQGHAGAQGPPGPPGIN |
| 44 | AQGPPGPPGIN |
| 45 | AQGPPGPPGINGSPG |
| 46 | AQGPPGPPGINGSPGGK |
| 47 | AQGPPGPPGINGSPGGKGEMGPA |
| 48 | AQGPPGPPGINGSPGGKGEMGPAGIPGAPGLMGAR |
| 49 | ARGNDGARGSDGQPGPPGPPGTA |
| 50 | ARGNDGARGSDGQPGPPGPPGTAGF |
| 51 | ARGNDGARGSDGQPGPPGPPGTAGFPGSPGAKGEVGPA |
| 52 | ARGNDGARGSDGQPGPPGPPGTAGFPGSPGAKGEVGPAGSPGSN |
| 53 | ARGPPGPAGANGAPGLR |
| 54 | ARGPPGPAGANGAPGLRGGAGEPGKN |
| 55 | ARGSDGQPGPPGPPGTA |
| 56 | ARGSDGQPGPPGPPGTAGFPGSPGAK |
| 57 | DAGAPGAPGGKGDAGAPGERGPP |
| 58 | DGAPGKNGERGGPGGPGPQGPPG |
| 59 | DGAPGKNGERGGPGGPGPQGPPGKN |
| 60 | DGAPGKNGERGGPGGPGPQGPPGKNGE |
| 61 | DGAPGKNGERGGPGGPGPQGPPGKNGETG |
| 62 | DGAPGKNGERGGPGGPGPQGPPGKNGETGP |
| 63 | DGAPGKNGERGGPGGPGPQGPPGKNGETGPQ |
| 64 | DGAPGKNGERGGPGGPGPQGPPGKNGETGPQG |
| 65 | DGAPGKNGERGGPGGPGPQGPPGKNGETGPQGPPG |
| 66 | DGAPGKNGERGGPGGPGPQGPPGKNGETGPQGPPGP |
| 67 | DGAPGKNGERGGPGGPGPQGPPGKNGETGPQGPPGPTG |
| 68 | DGAPGKNGERGGPGGPGPQGPPGKNGETGPQGPPGPTGPG |
| 69 | DGAPGKNGERGGPGGPGPQGPPGKNGETGPQGPPGPTGPGG |
| 70 | DGARGSDGQPGPPGPPG |
| 71 | DGARGSDGQPGPPGPPGTA |
| 72 | DGARGSDGQPGPPGPPGTAG |
| 73 | DGARGSDGQPGPPGPPGTAGF |
| 74 | DGARGSDGQPGPPGPPGTAGFPG |
| 75 | DGARGSDGQPGPPGPPGTAGFPGSPGAK |
| 76 | DGARGSDGQPGPPGPPGTAGFPGSPGAKG |
| 77 | DGARGSDGQPGPPGPPGTAGFPGSPGAKGEVGPA |
| 78 | DGARGSDGQPGPPGPPGTAGFPGSPGAKGEVGPAG |
| 79 | DGARGSDGQPGPPGPPGTAGFPGSPGAKGEVGPAGSPG |
| 80 | DGARGSDGQPGPPGPPGTAGFPGSPGAKGEVGPAGSPGSN |
| 81 | DGARGSDGQPGPPGPPGTAGFPGSPGAKGEVGPAGSPGSNGAPGQRGEPGPQ |
| 82 | DGESGRPGRPGERGLPGPPGIK |
| 83 | DGESGRPGRPGERGLPGPPGIKGPA |
| 84 | DGKPGPPGSQGESGRPGPPGPSGPRGQPGVM |
| 85 | DGQPGPPGPPGTA |
| 86 | DGRNGEKGETGAPGLK |
| 87 | DGRNGEKGETGAPGLKGENGLPGEN |
| 88 | DGRNGEKGETGAPGLKGENGLPGENGAPGPMGPR |
| 89 | DGRNGEKGETGAPGLKGENGLPGENGAPGPMGPRGAPGERGRPGLPGAA |
| 90 | DGRNGEKGETGAPGLKGENGLPGENGAPGPMGPRGAPGERGRPGLPGAAGAR |
| 91 | EKGETGAPGLKGENGLPGENGAPGPMGPR |
| 92 | EMGPAGIPGAPGLMGAR |
| 93 | ENGLPGENGAPGPMGPR |
| 94 | ENGLPGENGAPGPMGPRGAPGERGRPGLPGAAGAR |
| 95 | EPGQAGPSGPPGPPGAIGPS |
| 96 | ERGLPGPPGIKGPA |
| 97 | ESGRPGPPGPSGPRGQPGVM |
| 98 | ESGRPGPPGPSGPRGQPGVMGFPGPKGN |
| 99 | ESGRPGRPGERGLPGPPGIK |
| 100 | ETGAPGLKGENGLPGEN |
| 101 | ETGAPGLKGENGLPGENGAPGPMGPR |
| 102 | ETGPQGPPGPTGPGGD |
| 103 | EVGPAGSPGSNGAPGQRGEPGPQ |
| 104 | EVGPAGSPGSNGAPGQRGEPGPQGH |
| 105 | EVGPAGSPGSNGAPGQRGEPGPQGHAG |
| 106 | EVGPAGSPGSNGAPGQRGEPGPQGHAGAQ |
| 107 | EVGPAGSPGSNGAPGQRGEPGPQGHAGAQGPPGPPGIN |
| 108 | EVGPAGSPGSNGAPGQRGEPGPQGHAGAQGPPGPPGINGSPGGK |
| 109 | FDGRNGEKGETGAPGLKGEN |
| 110 | FDGRNGEKGETGAPGLKGENGLPGEN |
| 111 | FDGRNGEKGETGAPGLKGENGLPGENGAPGPMGPR |
| 112 | FPGSPGAKGEVGPA |
| 113 | FPGSPGAKGEVGPAGSPGSN |
| 114 | GAAGARGNDGARGSDGQPGPPGPP |
| 115 | GAAGARGNDGARGSDGQPGPPGPPGTA |
| 116 | GAAGARGNDGARGSDGQPGPPGPPGTAGFPGSPGAK |
| 117 | GAAGARGNDGARGSDGQPGPPGPPGTAGFPGSPGAKGEVGPA |
| 118 | GAAGEPGRDGVPGGPGMRGMPG |
| 119 | GAAGEPGRDGVPGGPGMRGMPGSPGGPG |
| 120 | GAAGERGAPGFRGPAGPN |
| 121 | GAIGPSGPAGKDGESGRPGRPGER |
| 122 | GAIGPSGPAGKDGESGRPGRPGERGLPGPP |
| 123 | GAIGPSGPAGKDGESGRPGRPGERGLPGPPGIK |
| 124 | GAKGEPGPRGERGEAGIPGVPG |
| 125 | GAKGEPGPRGERGEAGIPGVPGAK |
| 126 | GAKGEPGPRGERGEAGIPGVPGAKG |
| 127 | GAKGEPGPRGERGEAGIPGVPGAKGEDGK |
| 128 | GAKGEPGPRGERGEAGIPGVPGAKGEDGKDG |
| 129 | GAKGEPGPRGERGEAGIPGVPGAKGEDGKDGS |
| 130 | GAKGEPGPRGERGEAGIPGVPGAKGEDGKDGSPGEPGAN |
| 131 | GAKGEVGPAGSPGSNGAPGQRGEPGPQ |
| 132 | GAKGEVGPAGSPGSNGAPGQRGEPGPQG |
| 133 | GAKGEVGPAGSPGSNGAPGQRGEPGPQGH |
| 134 | GAKGEVGPAGSPGSNGAPGQRGEPGPQGHAGAQ |
| 135 | GAKGEVGPAGSPGSNGAPGQRGEPGPQGHAGAQGPPGPPGIN |
| 136 | GANGAPGLR |
| 137 | GANGAPGLRGGAGEPGKN |
| 138 | GANGAPGLRGGAGEPGKNGAK |
| 139 | GANGAPGLRGGAGEPGKNGAKGEPGPR |
| 140 | GANGAPGLRGGAGEPGKNGAKGEPGPRG |
| 141 | GANGAPGLRGGAGEPGKNGAKGEPGPRGER |
| 142 | GANGAPGLRGGAGEPGKNGAKGEPGPRGERG |
| 143 | GANGAPGLRGGAGEPGKNGAKGEPGPRGERGEAG |
| 144 | GAPGERGRPGLPGAA |
| 145 | GAPGERGRPGLPGAAG |
| 146 | GAPGERGRPGLPGAAGA |
| 147 | GAPGERGRPGLPGAAGAR |
| 148 | GAPGERGRPGLPGAAGARGN |
| 149 | GAPGERGRPGLPGAAGARGND |
| 150 | GAPGERGRPGLPGAAGARGNDG |
| 151 | GAPGERGRPGLPGAAGARGNDGA |
| 152 | GAPGERGRPGLPGAAGARGNDGAR |
| 153 | GAPGERGRPGLPGAAGARGNDGARG |
| 154 | GAPGERGRPGLPGAAGARGNDGARGS |
| 155 | GAPGERGRPGLPGAAGARGNDGARGSD |
| 156 | GAPGERGRPGLPGAAGARGNDGARGSDG |
| 157 | GAPGERGRPGLPGAAGARGNDGARGSDGQ |
| 158 | GAPGERGRPGLPGAAGARGNDGARGSDGQPG |
| 159 | GAPGERGRPGLPGAAGARGNDGARGSDGQPGP |
| 160 | GAPGERGRPGLPGAAGARGNDGARGSDGQPGPPG |
| 161 | GAPGERGRPGLPGAAGARGNDGARGSDGQPGPPGP |
| 162 | GAPGERGRPGLPGAAGARGNDGARGSDGQPGPPGPPG |
| 163 | GAPGERGRPGLPGAAGARGNDGARGSDGQPGPPGPPGTA |
| 164 | GAPGERGRPGLPGAAGARGNDGARGSDGQPGPPGPPGTAGFPGSPGAK |
| 165 | GAPGERGRPGLPGAAGARGNDGARGSDGQPGPPGPPGTAGFPGSPGAKGEVG |
| 166 | GAPGERGRPGLPGAAGARGNDGARGSDGQPGPPGPPGTAGFPGSPGAKGEVGPA |
| 167 | GAPGERGRPGLPGAAGARGNDGARGSDGQPGPPGPPGTAGFPGSPGAKGEVGPAG |
| 168 | GAPGLKGENGLPGENGAPGPMGPR |
| 169 | GAPGLMGARGPPGPA |
| 170 | GAPGLMGARGPPGPAGAN |
| 171 | GAPGLMGARGPPGPAGANGAP |
| 172 | GAPGLMGARGPPGPAGANGAPGLR |
| 173 | GAPGLMGARGPPGPAGANGAPGLRGGAGEPGKN |
| 174 | GAPGLRGGAGEPGKNGAKGEPGPRGERGEA |
| 175 | GAPGPAGPRGAAGEPGRDGVPG |
| 176 | GAPGPAGPRGAAGEPGRDGVPGGPGMRGMPG |
| 177 | GAPGPMGPRGAPGERGRPGLP |
| 178 | GAPGPMGPRGAPGERGRPGLPG |
| 179 | GAPGPMGPRGAPGERGRPGLPGAA |
| 180 | GAPGPMGPRGAPGERGRPGLPGAAG |
| 181 | GAPGPMGPRGAPGERGRPGLPGAAGA |
| 182 | GAPGPMGPRGAPGERGRPGLPGAAGAR |
| 183 | GAPGPMGPRGAPGERGRPGLPGAAGARGN |
| 184 | GAPGPMGPRGAPGERGRPGLPGAAGARGNDGAR |
| 185 | GAPGPMGPRGAPGERGRPGLPGAAGARGNDGARG |
| 186 | GAPGPMGPRGAPGERGRPGLPGAAGARGNDGARGSDGQPGPPGPPGTA |
| 187 | GAPGQRGEPGPQGHAGAQGPPGPP |
| 188 | GAPGQRGEPGPQGHAGAQGPPGPPG |
| 189 | GAPGQRGEPGPQGHAGAQGPPGPPGIN |
| 190 | GAPGQRGEPGPQGHAGAQGPPGPPGING |
| 191 | GAPGQRGEPGPQGHAGAQGPPGPPGINGS |
| 192 | GAPGQRGEPGPQGHAGAQGPPGPPGINGSPG |
| 193 | GAPGQRGEPGPQGHAGAQGPPGPPGINGSPGG |
| 194 | GAPGQRGEPGPQGHAGAQGPPGPPGINGSPGGK |
| 195 | GAPGQRGEPGPQGHAGAQGPPGPPGINGSPGGKGEM |
| 196 | GAPGQRGEPGPQGHAGAQGPPGPPGINGSPGGKGEMG |
| 197 | GAPGQRGEPGPQGHAGAQGPPGPPGINGSPGGKGEMGPA |
| 198 | GAPGQRGEPGPQGHAGAQGPPGPPGINGSPGGKGEMGPAGIPGAPGLM |
| 199 | GAPGQRGEPGPQGHAGAQGPPGPPGINGSPGGKGEMGPAGIPGAPGLMG |
| 200 | GAPGQRGEPGPQGHAGAQGPPGPPGINGSPGGKGEMGPAGIPGAPGLMGA |
| 201 | GAPGQRGEPGPQGHAGAQGPPGPPGINGSPGGKGEMGPAGIPGAPGLMGAR |
| 202 | GAQGPPGPPGIN |
| 203 | GARGNDGARGSDGQPGPPGPP |
| 204 | GARGNDGARGSDGQPGPPGPPGTA |
| 205 | GARGNDGARGSDGQPGPPGPPGTAGFPG |
| 206 | GARGNDGARGSDGQPGPPGPPGTAGFPGSPGA |
| 207 | GARGNDGARGSDGQPGPPGPPGTAGFPGSPGAK |
| 208 | GARGNDGARGSDGQPGPPGPPGTAGFPGSPGAKGEVGPA |
| 209 | GARGNDGARGSDGQPGPPGPPGTAGFPGSPGAKGEVGPAG |
| 210 | GARGNDGARGSDGQPGPPGPPGTAGFPGSPGAKGEVGPAGSPG |
| 211 | GARGNDGARGSDGQPGPPGPPGTAGFPGSPGAKGEVGPAGSPGSN |
| 212 | GARGPPGPAGAN |
| 213 | GARGPPGPAGANGAPGL |
| 214 | GARGPPGPAGANGAPGLR |
| 215 | GARGPPGPAGANGAPGLRG |
| 216 | GARGPPGPAGANGAPGLRGG |
| 217 | GARGPPGPAGANGAPGLRGGA |
| 218 | GARGPPGPAGANGAPGLRGGAG |
| 219 | GARGPPGPAGANGAPGLRGGAGE |
| 220 | GARGPPGPAGANGAPGLRGGAGEPG |
| 221 | GARGPPGPAGANGAPGLRGGAGEPGKN |
| 222 | GARGPPGPAGANGAPGLRGGAGEPGKNG |
| 223 | GARGPPGPAGANGAPGLRGGAGEPGKNGA |
| 224 | GARGPPGPAGANGAPGLRGGAGEPGKNGAK |
| 225 | GARGPPGPAGANGAPGLRGGAGEPGKNGAKGE |
| 226 | GARGPPGPAGANGAPGLRGGAGEPGKNGAKGEPG |
| 227 | GARGPPGPAGANGAPGLRGGAGEPGKNGAKGEPGPR |
| 228 | GARGPPGPAGANGAPGLRGGAGEPGKNGAKGEPGPRGER |
| 229 | GARGSDGQPGPPGPPGTA |
| 230 | GARGSDGQPGPPGPPGTAGFPGSPGAK |
| 231 | GARGSDGQPGPPGPPGTAGFPGSPGAKGEVGPA |
| 232 | GDKGDTGPPGPQGLQGLPGTGGPPGEN |
| 233 | GEKGETGAPGLK |
| 234 | GEKGETGAPGLKGENGLPGEN |
| 235 | GEKGETGAPGLKGENGLPGENGAPGPM |
| 236 | GEKGETGAPGLKGENGLPGENGAPGPMGPR |
| 237 | GEKGETGAPGLKGENGLPGENGAPGPMGPRGAPGERGRPGLPGAAGAR |
| 238 | GEMGPAGIPGAPGLM |
| 239 | GEMGPAGIPGAPGLMGAR |
| 240 | GEMGPAGIPGAPGLMGARGPPGPA |
| 241 | GEMGPAGIPGAPGLMGARGPPGPAGAN |
| 242 | GEMGPAGIPGAPGLMGARGPPGPAGANGAPGLR |
| 243 | GEMGPAGIPGAPGLMGARGPPGPAGANGAPGLRGGAGEPGKN |
| 244 | GENGLPGENGAPGPM |
| 245 | GENGLPGENGAPGPMGPR |
| 246 | GENGLPGENGAPGPMGPRG |
| 247 | GENGLPGENGAPGPMGPRGAPG |
| 248 | GENGLPGENGAPGPMGPRGAPGER |
| 249 | GENGLPGENGAPGPMGPRGAPGERG |
| 250 | GENGLPGENGAPGPMGPRGAPGERGR |
| 251 | GENGLPGENGAPGPMGPRGAPGERGRPGLPGAA |
| 252 | GENGLPGENGAPGPMGPRGAPGERGRPGLPGAAGA |
| 253 | GENGLPGENGAPGPMGPRGAPGERGRPGLPGAAGAR |
| 254 | GENGLPGENGAPGPMGPRGAPGERGRPGLPGAAGARGN |
| 255 | GEPGANGLPGAAGERGAPGFRGPAGPN |
| 256 | GEPGPKGDAGAPGAPGGKGDAGAPG |
| 257 | GEPGPKGDAGAPGAPGGKGDAGAPGE |
| 258 | GEPGPQGHAGAQGPPGPPGIN |
| 259 | GEPGPQGHAGAQGPPGPPGINGSPGGKGEMGPA |
| 260 | GEPGPQGHAGAQGPPGPPGINGSPGGKGEMGPAGIPGAPGLM |
| 261 | GEPGPRGERGEAGIPGVPGAKGEDGKDG |
| 262 | GEPGQAGPSGPPGPPGAIGPS |
| 263 | GEPGQAGPSGPPGPPGAIGPSGPAGKD |
| 264 | GEPGRDGVPGGPGMRGMPGSPGGPG |
| 265 | GERGEAGIPGVPGAKG |
| 266 | GERGEAGIPGVPGAKGEDGKDG |
| 267 | GERGEAGIPGVPGAKGEDGKDGSPGEPGAN |
| 268 | GERGGPGGPGPQGPPGK |
| 269 | GERGGPGGPGPQGPPGKN |
| 270 | GERGGPGGPGPQGPPGKNG |
| 271 | GERGGPGGPGPQGPPGKNGETGP |
| 272 | GERGGPGGPGPQGPPGKNGETGPQ |
| 273 | GERGGPGGPGPQGPPGKNGETGPQG |
| 274 | GERGGPGGPGPQGPPGKNGETGPQGPP |
| 275 | GERGGPGGPGPQGPPGKNGETGPQGPPG |
| 276 | GERGGPGGPGPQGPPGKNGETGPQGPPGP |
| 277 | GERGGPGGPGPQGPPGKNGETGPQGPPGPT |
| 278 | GERGGPGGPGPQGPPGKNGETGPQGPPGPTG |
| 279 | GERGGPGGPGPQGPPGKNGETGPQGPPGPTGPG |
| 280 | GERGGPGGPGPQGPPGKNGETGPQGPPGPTGPGG |
| 281 | GERGGPGGPGPQGPPGKNGETGPQGPPGPTGPGGD |
| 282 | GERGGPGGPGPQGPPGKNGETGPQGPPGPTGPGGDK |
| 283 | GERGGPGGPGPQGPPGKNGETGPQGPPGPTGPGGDKG |
| 284 | GERGGPGGPGPQGPPGKNGETGPQGPPGPTGPGGDKGD |
| 285 | GERGGPGGPGPQGPPGKNGETGPQGPPGPTGPGGDKGDTG |
| 286 | GERGGPGGPGPQGPPGKNGETGPQGPPGPTGPGGDKGDTGPPG |
| 287 | GERGGPGGPGPQGPPGKNGETGPQGPPGPTGPGGDKGDTGPPGPQ |
| 288 | GERGGPGGPGPQGPPGKNGETGPQGPPGPTGPGGDKGDTGPPGPQG |
| 289 | GERGGPGGPGPQGPPGKNGETGPQGPPGPTGPGGDKGDTGPPGPQGLQ |
| 290 | GERGGPGGPGPQGPPGKNGETGPQGPPGPTGPGGDKGDTGPPGPQGLQG |
| 291 | GERGLPGPPGIK |
| 292 | GERGLPGPPGIKGPA |
| 293 | GERGLPGPPGIKGPAGIPGFPGMK |
| 294 | GESGRPGPPGPSGPRGQPGVM |
| 295 | GESGRPGPPGPSGPRGQPGVMGFPGPKGN |
| 296 | GESGRPGRPGERGLPGPPGIK |
| 297 | GESGRPGRPGERGLPGPPGIKG |
| 298 | GESGRPGRPGERGLPGPPGIKGPA |
| 299 | GESGRPGRPGERGLPGPPGIKGPAGIPGFPGMK |
| 300 | GETGAPGLKGENGLPGEN |
| 301 | GETGAPGLKGENGLPGENGAPGPMGPR |
| 302 | GETGAPGLKGENGLPGENGAPGPMGPRGAPGERGRPGLPGAAGAR |
| 303 | GETGAPGLKGENGLPGENGAPGPMGPRGAPGERGRPGLPGAAGARGN |
| 304 | GETGPQGPPGPTGPG |
| 305 | GETGPQGPPGPTGPGGD |
| 306 | GETGPQGPPGPTGPGGDKGDTG |
| 307 | GETGPQGPPGPTGPGGDKGDTGPPG |
| 308 | GETGPQGPPGPTGPGGDKGDTGPPGPQ |
| 309 | GETGPQGPPGPTGPGGDKGDTGPPGPQG |
| 310 | GEVGPAGSPGSNGAPG |
| 311 | GEVGPAGSPGSNGAPGQ |
| 312 | GEVGPAGSPGSNGAPGQRGE |
| 313 | GEVGPAGSPGSNGAPGQRGEP |
| 314 | GEVGPAGSPGSNGAPGQRGEPG |
| 315 | GEVGPAGSPGSNGAPGQRGEPGP |
| 316 | GEVGPAGSPGSNGAPGQRGEPGPQ |
| 317 | GEVGPAGSPGSNGAPGQRGEPGPQG |
| 318 | GEVGPAGSPGSNGAPGQRGEPGPQGH |
| 319 | GEVGPAGSPGSNGAPGQRGEPGPQGHA |
| 320 | GEVGPAGSPGSNGAPGQRGEPGPQGHAG |
| 321 | GEVGPAGSPGSNGAPGQRGEPGPQGHAGA |
| 322 | GEVGPAGSPGSNGAPGQRGEPGPQGHAGAQ |
| 323 | GEVGPAGSPGSNGAPGQRGEPGPQGHAGAQG |
| 324 | GEVGPAGSPGSNGAPGQRGEPGPQGHAGAQGP |
| 325 | GEVGPAGSPGSNGAPGQRGEPGPQGHAGAQGPP |
| 326 | GEVGPAGSPGSNGAPGQRGEPGPQGHAGAQGPPG |
| 327 | GEVGPAGSPGSNGAPGQRGEPGPQGHAGAQGPPGP |
| 328 | GEVGPAGSPGSNGAPGQRGEPGPQGHAGAQGPPGPP |
| 329 | GEVGPAGSPGSNGAPGQRGEPGPQGHAGAQGPPGPPG |
| 330 | GEVGPAGSPGSNGAPGQRGEPGPQGHAGAQGPPGPPGIN |
| 331 | GEVGPAGSPGSNGAPGQRGEPGPQGHAGAQGPPGPPGING |
| 332 | GEVGPAGSPGSNGAPGQRGEPGPQGHAGAQGPPGPPGINGS |
| 333 | GEVGPAGSPGSNGAPGQRGEPGPQGHAGAQGPPGPPGINGSPG |
| 334 | GEVGPAGSPGSNGAPGQRGEPGPQGHAGAQGPPGPPGINGSPGG |
| 335 | GEVGPAGSPGSNGAPGQRGEPGPQGHAGAQGPPGPPGINGSPGGK |
| 336 | GEVGPAGSPGSNGAPGQRGEPGPQGHAGAQGPPGPPGINGSPGGKG |
| 337 | GEVGPAGSPGSNGAPGQRGEPGPQGHAGAQGPPGPPGINGSPGGKGEM |
| 338 | GEVGPAGSPGSNGAPGQRGEPGPQGHAGAQGPPGPPGINGSPGGKGEMG |
| 339 | GEVGPAGSPGSNGAPGQRGEPGPQGHAGAQGPPGPPGINGSPGGKGEMGPA |
| 340 | GEVGPAGSPGSNGAPGQRGEPGPQGHAGAQGPPGPPGINGSPGGKGEMGPAG |
| 341 | GFDGRNGEKGETGAPGLK |
| 342 | GFDGRNGEKGETGAPGLKG |
| 343 | GFDGRNGEKGETGAPGLKGEN |
| 344 | GFDGRNGEKGETGAPGLKGENG |
| 345 | GFDGRNGEKGETGAPGLKGENGLPGEN |
| 346 | GFDGRNGEKGETGAPGLKGENGLPGENGAPGPMGPR |
| 347 | GFDGRNGEKGETGAPGLKGENGLPGENGAPGPMGPRGAPGERGRPGLPGAA |
| 348 | GFPGMKGHRGFDGRNGEKGETGAPGLK |
| 349 | GFPGMKGHRGFDGRNGEKGETGAPGLKGEN |
| 350 | GFPGPKGNDGAPGKN |
| 351 | GFPGPKGNDGAPGKNGER |
| 352 | GFPGPKGNDGAPGKNGERG |
| 353 | GFPGPKGNDGAPGKNGERGG |
| 354 | GFPGPKGNDGAPGKNGERGGP |
| 355 | GFPGPKGNDGAPGKNGERGGPG |
| 356 | GFPGPKGNDGAPGKNGERGGPGG |
| 357 | GFPGPKGNDGAPGKNGERGGPGGP |
| 358 | GFPGPKGNDGAPGKNGERGGPGGPG |
| 359 | GFPGPKGNDGAPGKNGERGGPGGPGP |
| 360 | GFPGPKGNDGAPGKNGERGGPGGPGPQ |
| 361 | GFPGPKGNDGAPGKNGERGGPGGPGPQG |
| 362 | GFPGPKGNDGAPGKNGERGGPGGPGPQGP |
| 363 | GFPGPKGNDGAPGKNGERGGPGGPGPQGPP |
| 364 | GFPGPKGNDGAPGKNGERGGPGGPGPQGPPG |
| 365 | GFPGPKGNDGAPGKNGERGGPGGPGPQGPPGK |
| 366 | GFPGPKGNDGAPGKNGERGGPGGPGPQGPPGKN |
| 367 | GFPGPKGNDGAPGKNGERGGPGGPGPQGPPGKNG |
| 368 | GFPGPKGNDGAPGKNGERGGPGGPGPQGPPGKNGE |
| 369 | GFPGPKGNDGAPGKNGERGGPGGPGPQGPPGKNGET |
| 370 | GFPGPKGNDGAPGKNGERGGPGGPGPQGPPGKNGETG |
| 371 | GFPGPKGNDGAPGKNGERGGPGGPGPQGPPGKNGETGP |
| 372 | GFPGPKGNDGAPGKNGERGGPGGPGPQGPPGKNGETGPQ |
| 373 | GFPGPKGNDGAPGKNGERGGPGGPGPQGPPGKNGETGPQG |
| 374 | GFPGPKGNDGAPGKNGERGGPGGPGPQGPPGKNGETGPQGPPG |
| 375 | GFPGPKGNDGAPGKNGERGGPGGPGPQGPPGKNGETGPQGPPGPTG |
| 376 | GFPGPKGNDGAPGKNGERGGPGGPGPQGPPGKNGETGPQGPPGPTGPGGDK |
| 377 | GFPGSPGAKGEVG |
| 378 | GFPGSPGAKGEVGP |
| 379 | GFPGSPGAKGEVGPA |
| 380 | GFPGSPGAKGEVGPAG |
| 381 | GFPGSPGAKGEVGPAGS |
| 382 | GFPGSPGAKGEVGPAGSPG |
| 383 | GFPGSPGAKGEVGPAGSPGSN |
| 384 | GFPGSPGAKGEVGPAGSPGSNG |
| 385 | GFPGSPGAKGEVGPAGSPGSNGA |
| 386 | GFPGSPGAKGEVGPAGSPGSNGAPG |
| 387 | GFPGSPGAKGEVGPAGSPGSNGAPGQR |
| 388 | GFPGSPGAKGEVGPAGSPGSNGAPGQRG |
| 389 | GFPGSPGAKGEVGPAGSPGSNGAPGQRGE |
| 390 | GFPGSPGAKGEVGPAGSPGSNGAPGQRGEP |
| 391 | GFPGSPGAKGEVGPAGSPGSNGAPGQRGEPG |
| 392 | GFPGSPGAKGEVGPAGSPGSNGAPGQRGEPGPQ |
| 393 | GFPGSPGAKGEVGPAGSPGSNGAPGQRGEPGPQG |
| 394 | GFPGSPGAKGEVGPAGSPGSNGAPGQRGEPGPQGH |
| 395 | GFPGSPGAKGEVGPAGSPGSNGAPGQRGEPGPQGHA |
| 396 | GFPGSPGAKGEVGPAGSPGSNGAPGQRGEPGPQGHAG |
| 397 | GFPGSPGAKGEVGPAGSPGSNGAPGQRGEPGPQGHAGA |
| 398 | GFPGSPGAKGEVGPAGSPGSNGAPGQRGEPGPQGHAGAQ |
| 399 | GFPGSPGAKGEVGPAGSPGSNGAPGQRGEPGPQGHAGAQG |
| 400 | GFPGSPGAKGEVGPAGSPGSNGAPGQRGEPGPQGHAGAQGPP |
| 401 | GFPGSPGAKGEVGPAGSPGSNGAPGQRGEPGPQGHAGAQGPPG |
| 402 | GFPGSPGAKGEVGPAGSPGSNGAPGQRGEPGPQGHAGAQGPPGPPG |
| 403 | GFPGSPGAKGEVGPAGSPGSNGAPGQRGEPGPQGHAGAQGPPGPPGIN |
| 404 | GFPGSPGAKGEVGPAGSPGSNGAPGQRGEPGPQGHAGAQGPPGPPGING |
| 405 | GFPGSPGAKGEVGPAGSPGSNGAPGQRGEPGPQGHAGAQGPPGPPGINGSPG |
| 406 | GFPGSPGAKGEVGPAGSPGSNGAPGQRGEPGPQGHAGAQGPPGPPGINGSPGGK |
| 407 | GFRGPAGPNGIPGEKGPAGERGAPGPA |
| 408 | GGAGEPGKNGAKGEPGPR |
| 409 | GGAGEPGKNGAKGEPGPRGERGEAGIP |
| 410 | GGAGEPGKNGAKGEPGPRGERGEAGIPG |
| 411 | GGKGEMGPAGIPGAPGLM |
| 412 | GGKGEMGPAGIPGAPGLMGA |
| 413 | GGKGEMGPAGIPGAPGLMGAR |
| 414 | GGPGGPGPQGPPGKNGETGPQGPPGPTGPGGD |
| 415 | GGPGMRGMPGSPGGPGSDGKPGPPGSQGESGRPGPPGPSGPRGQPGVM |
| 416 | GGPGSDGKPGPPGSQGESGRPGPPG |
| 417 | GGPGSDGKPGPPGSQGESGRPGPPGPS |
| 418 | GGPGSDGKPGPPGSQGESGRPGPPGPSGPR |
| 419 | GGPGSDGKPGPPGSQGESGRPGPPGPSGPRGQ |
| 420 | GGPGSDGKPGPPGSQGESGRPGPPGPSGPRGQPGVM |
| 421 | GHAGAQGPPGPPGIN |
| 422 | GHAGAQGPPGPPGING |
| 423 | GHAGAQGPPGPPGINGSPG |
| 424 | GHAGAQGPPGPPGINGSPGGK |
| 425 | GHAGAQGPPGPPGINGSPGGKGEMG |
| 426 | GHAGAQGPPGPPGINGSPGGKGEMGPA |
| 427 | GHAGAQGPPGPPGINGSPGGKGEMGPAGIPGAPGLM |
| 428 | GHAGAQGPPGPPGINGSPGGKGEMGPAGIPGAPGLMG |
| 429 | GHAGAQGPPGPPGINGSPGGKGEMGPAGIPGAPGLMGA |
| 430 | GHAGAQGPPGPPGINGSPGGKGEMGPAGIPGAPGLMGAR |
| 431 | GHAGAQGPPGPPGINGSPGGKGEMGPAGIPGAPGLMGARGPPGPA |
| 432 | GHAGAQGPPGPPGINGSPGGKGEMGPAGIPGAPGLMGARGPPGPAGAN |
| 433 | GHAGAQGPPGPPGINGSPGGKGEMGPAGIPGAPGLMGARGPPGPAGANGAPGLR |
| 434 | GHPGSPGSPGYQGPPGEPG |
| 435 | GHPGSPGSPGYQGPPGEPGQA |
| 436 | GHPGSPGSPGYQGPPGEPGQAG |
| 437 | GHPGSPGSPGYQGPPGEPGQAGPS |
| 438 | GHPGSPGSPGYQGPPGEPGQAGPSGPPGPPGAIGPS |
| 439 | GHPGSPGSPGYQGPPGEPGQAGPSGPPGPPGAIGPSGPA |
| 440 | GHPGSPGSPGYQGPPGEPGQAGPSGPPGPPGAIGPSGPAGKDGESGRPGRPGER |
| 441 | GHRGFDGRNGEKGETGAPGLK |
| 442 | GHRGFDGRNGEKGETGAPGLKGEN |
| 443 | GHRGFDGRNGEKGETGAPGLKGENG |
| 444 | GHRGFDGRNGEKGETGAPGLKGENGLPGEN |
| 445 | GHRGFDGRNGEKGETGAPGLKGENGLPGENGAPGPMGPR |
| 446 | GHRGFDGRNGEKGETGAPGLKGENGLPGENGAPGPMGPRGAPGER |
| 447 | GIKGPAGIP |
| 448 | GIKGPAGIPGFPG |
| 449 | GIKGPAGIPGFPGMKG |
| 450 | GIPGAPGLM |
| 451 | GIPGAPGLMG |
| 452 | GIPGAPGLMGA |
| 453 | GIPGAPGLMGAR |
| 454 | GIPGAPGLMGARGPPG |
| 455 | GIPGAPGLMGARGPPGPA |
| 456 | GIPGAPGLMGARGPPGPAG |
| 457 | GIPGAPGLMGARGPPGPAGAN |
| 458 | GIPGAPGLMGARGPPGPAGANGAPGLR |
| 459 | GIPGAPGLMGARGPPGPAGANGAPGLRG |
| 460 | GIPGAPGLMGARGPPGPAGANGAPGLRGGAGEPGKN |
| 461 | GIPGEKGPAGERGAPGPA |
| 462 | GIPGEKGPAGERGAPGPAG |
| 463 | GIPGEKGPAGERGAPGPAGPR |
| 464 | GIPGEKGPAGERGAPGPAGPRG |
| 465 | GIPGEKGPAGERGAPGPAGPRGA |
| 466 | GIPGEKGPAGERGAPGPAGPRGAA |
| 467 | GIPGEKGPAGERGAPGPAGPRGAAG |
| 468 | GIPGEKGPAGERGAPGPAGPRGAAGEPG |
| 469 | GIPGEKGPAGERGAPGPAGPRGAAGEPGR |
| 470 | GIPGEKGPAGERGAPGPAGPRGAAGEPGRD |
| 471 | GIPGEKGPAGERGAPGPAGPRGAAGEPGRDGVPG |
| 472 | GIPGEKGPAGERGAPGPAGPRGAAGEPGRDGVPGG |
| 473 | GIPGEKGPAGERGAPGPAGPRGAAGEPGRDGVPGGPG |
| 474 | GIPGEKGPAGERGAPGPAGPRGAAGEPGRDGVPGGPGMR |
| 475 | GIPGFPGMKGH |
| 476 | GIPGFPGMKGHR |
| 477 | GIPGFPGMKGHRGF |
| 478 | GIPGFPGMKGHRGFD |
| 479 | GIPGFPGMKGHRGFDGR |
| 480 | GIPGFPGMKGHRGFDGRN |
| 481 | GIPGFPGMKGHRGFDGRNGEK |
| 482 | GIPGFPGMKGHRGFDGRNGEKG |
| 483 | GIPGFPGMKGHRGFDGRNGEKGETGAPGLK |
| 484 | GIPGFPGMKGHRGFDGRNGEKGETGAPGLKGEN |
| 485 | GIPGFPGMKGHRGFDGRNGEKGETGAPGLKGENGLPGEN |
| 486 | GIPGFPGMKGHRGFDGRNGEKGETGAPGLKGENGLPGENGAPGPMGPR |
| 487 | GKDGESGRPGRPGERGLPGPPGIK |
| 488 | GKDGESGRPGRPGERGLPGPPGIKGPA |
| 489 | GKDGESGRPGRPGERGLPGPPGIKGPAGIPGFPGMK |
| 490 | GKDGSPGEPGANGLPGA |
| 491 | GKDGSPGEPGANGLPGAAGERGAPG |
| 492 | GKDGSPGEPGANGLPGAAGERGAPGFRGPAGPN |
| 493 | GKGEMGPAGIPGAPGLM |
| 494 | GKGEMGPAGIPGAPGLMG |
| 495 | GKGEMGPAGIPGAPGLMGA |
| 496 | GKGEMGPAGIPGAPGLMGAR |
| 497 | GKGEMGPAGIPGAPGLMGARGPPGPA |
| 498 | GKGEMGPAGIPGAPGLMGARGPPGPAGAN |
| 499 | GKGEMGPAGIPGAPGLMGARGPPGPAGANGAPGLR |
| 500 | GKPGEPGPKGDAGAPGAPGGKGDAGAPG |
| 501 | GKPGEPGPKGDAGAPGAPGGKGDAGAPGE |
| 502 | GKPGEPGPKGDAGAPGAPGGKGDAGAPGER |
| 503 | GKPGEPGPKGDAGAPGAPGGKGDAGAPGERG |
| 504 | GKPGEPGPKGDAGAPGAPGGKGDAGAPGERGPP |
| 505 | GKPGPPGSQGESGRPGPPGPSGPR |
| 506 | GKPGPPGSQGESGRPGPPGPSGPRGQ |
| 507 | GKPGPPGSQGESGRPGPPGPSGPRGQPGVM |
| 508 | GLAGYPGPAGPPGPPGPPGTS |
| 509 | GLAGYPGPAGPPGPPGPPGTSGHPGSPGSPGYQGPPGEPGQAGPSGPPGPPGAIGPS |
| 510 | GLKGENGLPGENGAPGPMGPR |
| 511 | GLMGARGPPGPAGANGAPGLR |
| 512 | GLPGAAGARGNDGARGSDGQPGPPGPPGTA |
| 513 | GLPGAAGARGNDGARGSDGQPGPPGPPGTAGFPGSPGAKGEVGPA |
| 514 | GLPGAAGERGAPGF |
| 515 | GLPGAAGERGAPGFR |
| 516 | GLPGAAGERGAPGFRG |
| 517 | GLPGAAGERGAPGFRGPAG |
| 518 | GLPGAAGERGAPGFRGPAGPN |
| 519 | GLPGAAGERGAPGFRGPAGPNGIPGEKG |
| 520 | GLPGAAGERGAPGFRGPAGPNGIPGEKGPAGER |
| 521 | GLPGAAGERGAPGFRGPAGPNGIPGEKGPAGERGAPG |
| 522 | GLPGAAGERGAPGFRGPAGPNGIPGEKGPAGERGAPGPAGPR |
| 523 | GLPGENGAPGPM |
| 524 | GLPGENGAPGPMG |
| 525 | GLPGENGAPGPMGPR |
| 526 | GLPGENGAPGPMGPRG |
| 527 | GLPGENGAPGPMGPRGAPG |
| 528 | GLPGENGAPGPMGPRGAPGERGR |
| 529 | GLPGENGAPGPMGPRGAPGERGRPG |
| 530 | GLPGENGAPGPMGPRGAPGERGRPGLPGAAGAR |
| 531 | GLPGENGAPGPMGPRGAPGERGRPGLPGAAGARGN |
| 532 | GLPGENGAPGPMGPRGAPGERGRPGLPGAAGARGNDGARG |
| 533 | GLPGENGAPGPMGPRGAPGERGRPGLPGAAGARGNDGARGSDGQ |
| 534 | GLPGENGAPGPMGPRGAPGERGRPGLPGAAGARGNDGARGSDGQPGPPGPPGTA |
| 535 | GLPGPPGIK |
| 536 | GLPGPPGIKG |
| 537 | GLPGPPGIKGP |
| 538 | GLPGPPGIKGPA |
| 539 | GLPGPPGIKGPAG |
| 540 | GLPGPPGIKGPAGIP |
| 541 | GLPGPPGIKGPAGIPG |
| 542 | GLPGPPGIKGPAGIPGF |
| 543 | GLPGPPGIKGPAGIPGFPGM |
| 544 | GLPGPPGIKGPAGIPGFPGMK |
| 545 | GLPGPPGIKGPAGIPGFPGMKG |
| 546 | GLPGPPGIKGPAGIPGFPGMKGH |
| 547 | GLPGPPGIKGPAGIPGFPGMKGHR |
| 548 | GLPGPPGIKGPAGIPGFPGMKGHRGF |
| 549 | GLPGTGGPPGEN |
| 550 | GLRGGAGEPGKNGAKGEPGPRGERGEAGIP |
| 551 | GMPGSPGGPGSDGKPGPPG |
| 552 | GMPGSPGGPGSDGKPGPPGSQ |
| 553 | GMPGSPGGPGSDGKPGPPGSQG |
| 554 | GMPGSPGGPGSDGKPGPPGSQGESGRPGPPGPSGPR |
| 555 | GMPGSPGGPGSDGKPGPPGSQGESGRPGPPGPSGPRGQPGVM |
| 556 | GMRGMPGSPGGPGSDGKPGPPGSQGESGRPGPPGPSGPRGQPGVM |
| 557 | GNDGAPGKNGERGGPGGPGPQGPPGKN |
| 558 | GNDGAPGKNGERGGPGGPGPQGPPGKNGETGPQG |
| 559 | GNDGAPGKNGERGGPGGPGPQGPPGKNGETGPQGPPGP |
| 560 | GNDGARGSDGQPGPPGPPGTA |
| 561 | GNDGARGSDGQPGPPGPPGTAG |
| 562 | GNDGARGSDGQPGPPGPPGTAGF |
| 563 | GNDGARGSDGQPGPPGPPGTAGFPG |
| 564 | GNDGARGSDGQPGPPGPPGTAGFPGS |
| 565 | GNDGARGSDGQPGPPGPPGTAGFPGSPGAK |
| 566 | GNDGARGSDGQPGPPGPPGTAGFPGSPGAKG |
| 567 | GNDGARGSDGQPGPPGPPGTAGFPGSPGAKGEVG |
| 568 | GNDGARGSDGQPGPPGPPGTAGFPGSPGAKGEVGPA |
| 569 | GNDGARGSDGQPGPPGPPGTAGFPGSPGAKGEVGPAG |
| 570 | GNDGARGSDGQPGPPGPPGTAGFPGSPGAKGEVGPAGS |
| 571 | GNDGARGSDGQPGPPGPPGTAGFPGSPGAKGEVGPAGSPG |
| 572 | GNDGARGSDGQPGPPGPPGTAGFPGSPGAKGEVGPAGSPGSN |
| 573 | GNDGARGSDGQPGPPGPPGTAGFPGSPGAKGEVGPAGSPGSNGAPGQR |
| 574 | GNDGARGSDGQPGPPGPPGTAGFPGSPGAKGEVGPAGSPGSNGAPGQRGE |
| 575 | GNDGARGSDGQPGPPGPPGTAGFPGSPGAKGEVGPAGSPGSNGAPGQRGEPGPQ |
| 576 | GNDGARGSDGQPGPPGPPGTAGFPGSPGAKGEVGPAGSPGSNGAPGQRGEPGPQG |
| 577 | GPAGANGAPGLRGGAGEPG |
| 578 | GPAGIPGAPGLM |
| 579 | GPAGIPGAPGLMG |
| 580 | GPAGIPGAPGLMGA |
| 581 | GPAGIPGAPGLMGAR |
| 582 | GPAGIPGAPGLMGARGPPGPAGANGAPGLR |
| 583 | GPAGIPGFP |
| 584 | GPAGIPGFPG |
| 585 | GPAGIPGFPGM |
| 586 | GPAGIPGFPGMK |
| 587 | GPAGIPGFPGMKG |
| 588 | GPAGIPGFPGMKGH |
| 589 | GPAGIPGFPGMKGHR |
| 590 | GPAGIPGFPGMKGHRG |
| 591 | GPAGIPGFPGMKGHRGF |
| 592 | GPAGIPGFPGMKGHRGFD |
| 593 | GPAGIPGFPGMKGHRGFDG |
| 594 | GPAGIPGFPGMKGHRGFDGR |
| 595 | GPAGIPGFPGMKGHRGFDGRN |
| 596 | GPAGIPGFPGMKGHRGFDGRNG |
| 597 | GPAGIPGFPGMKGHRGFDGRNGE |
| 598 | GPAGIPGFPGMKGHRGFDGRNGEK |
| 599 | GPAGIPGFPGMKGHRGFDGRNGEKG |
| 600 | GPAGIPGFPGMKGHRGFDGRNGEKGE |
| 601 | GPAGIPGFPGMKGHRGFDGRNGEKGET |
| 602 | GPAGIPGFPGMKGHRGFDGRNGEKGETG |
| 603 | GPAGIPGFPGMKGHRGFDGRNGEKGETGA |
| 604 | GPAGIPGFPGMKGHRGFDGRNGEKGETGAP |
| 605 | GPAGIPGFPGMKGHRGFDGRNGEKGETGAPG |
| 606 | GPAGIPGFPGMKGHRGFDGRNGEKGETGAPGL |
| 607 | GPAGIPGFPGMKGHRGFDGRNGEKGETGAPGLK |
| 608 | GPAGIPGFPGMKGHRGFDGRNGEKGETGAPGLKG |
| 609 | GPAGIPGFPGMKGHRGFDGRNGEKGETGAPGLKGEN |
| 610 | GPAGIPGFPGMKGHRGFDGRNGEKGETGAPGLKGENGLPG |
| 611 | GPAGIPGFPGMKGHRGFDGRNGEKGETGAPGLKGENGLPGEN |
| 612 | GPAGIPGFPGMKGHRGFDGRNGEKGETGAPGLKGENGLPGENGAPGPM |
| 613 | GPAGIPGFPGMKGHRGFDGRNGEKGETGAPGLKGENGLPGENGAPGPMGPR |
| 614 | GPAGKDGESGRPGRPGERGLPGPP |
| 615 | GPAGKDGESGRPGRPGERGLPGPPG |
| 616 | GPAGKDGESGRPGRPGERGLPGPPGIK |
| 617 | GPAGKDGESGRPGRPGERGLPGPPGIKGPA |
| 618 | GPAGKDGESGRPGRPGERGLPGPPGIKGPAGIPGFPGMK |
| 619 | GPAGPNGIPGEKGPAGERGAPGPAGPR |
| 620 | GPAGPPGPPGPP |
| 621 | GPGMRGMPGSPGGPGSDGKPGPPG |
| 622 | GPGMRGMPGSPGGPGSDGKPGPPGSQGESGRPGPPGPSGPRGQPGVM |
| 623 | GPGSDGKPGPPGSQGESGRPGPPG |
| 624 | GPGSDGKPGPPGSQGESGRPGPPGPSG |
| 625 | GPGSDGKPGPPGSQGESGRPGPPGPSGPR |
| 626 | GPGSDGKPGPPGSQGESGRPGPPGPSGPRGQPGVM |
| 627 | GPGSDGKPGPPGSQGESGRPGPPGPSGPRGQPGVMGFPGPKGN |
| 628 | GPMGPRGAPGERGRPGLPGAA |
| 629 | GPMGPRGAPGERGRPGLPGAAGAR |
| 630 | GPNGIPGEKGPAGERGAPGPA |
| 631 | GPPGAIGPSGPAGKDGESGRPGRPGER |
| 632 | GPPGAIGPSGPAGKDGESGRPGRPGERGLPGPPGIK |
| 633 | GPPGEPGQAGPSGPPGPPG |
| 634 | GPPGEPGQAGPSGPPGPPGAIGPS |
| 635 | GPPGEPGQAGPSGPPGPPGAIGPSGPAGKD |
| 636 | GPPGEPGQAGPSGPPGPPGAIGPSGPAGKDGESGRPGRPGERGLPGPPGIK |
| 637 | GPPGIKGPAGIPGFPGMK |
| 638 | GPPGINGSPGGKGEMGPAGIPGAPGLM |
| 639 | GPPGPAGANGAPGLR |
| 640 | GPPGPAGANGAPGLRG |
| 641 | GPPGPAGANGAPGLRGG |
| 642 | GPPGPAGANGAPGLRGGA |
| 643 | GPPGPAGANGAPGLRGGAG |
| 644 | GPPGPAGANGAPGLRGGAGE |
| 645 | GPPGPAGANGAPGLRGGAGEP |
| 646 | GPPGPAGANGAPGLRGGAGEPG |
| 647 | GPPGPAGANGAPGLRGGAGEPGK |
| 648 | GPPGPAGANGAPGLRGGAGEPGKN |
| 649 | GPPGPAGANGAPGLRGGAGEPGKNG |
| 650 | GPPGPAGANGAPGLRGGAGEPGKNGA |
| 651 | GPPGPAGANGAPGLRGGAGEPGKNGAK |
| 652 | GPPGPAGANGAPGLRGGAGEPGKNGAKG |
| 653 | GPPGPAGANGAPGLRGGAGEPGKNGAKGE |
| 654 | GPPGPAGANGAPGLRGGAGEPGKNGAKGEPG |
| 655 | GPPGPAGANGAPGLRGGAGEPGKNGAKGEPGPR |
| 656 | GPPGPAGANGAPGLRGGAGEPGKNGAKGEPGPRG |
| 657 | GPPGPAGANGAPGLRGGAGEPGKNGAKGEPGPRGE |
| 658 | GPPGPAGANGAPGLRGGAGEPGKNGAKGEPGPRGER |
| 659 | GPPGPAGANGAPGLRGGAGEPGKNGAKGEPGPRGERG |
| 660 | GPPGPAGANGAPGLRGGAGEPGKNGAKGEPGPRGERGE |
| 661 | GPPGPAGANGAPGLRGGAGEPGKNGAKGEPGPRGERGEA |
| 662 | GPPGPPGAIGPS |
| 663 | GPPGPPGAIGPSGPA |
| 664 | GPPGPPGAIGPSGPAGKDGESGRPGRPGER |
| 665 | GPPGPPGAIGPSGPAGKDGESGRPGRPGERGLPGPPGIK |
| 666 | GPPGPPGINGSPGGKGEMGPA |
| 667 | GPPGPPGINGSPGGKGEMGPAGIPGAPGLM |
| 668 | GPPGPPGINGSPGGKGEMGPAGIPGAPGLMGA |
| 669 | GPPGPPGINGSPGGKGEMGPAGIPGAPGLMGAR |
| 670 | GPPGPPGINGSPGGKGEMGPAGIPGAPGLMGARGPPGPAGANGAPGLR |
| 671 | GPPGPPGPPGTS |
| 672 | GPPGPPGPPGTSGHPG |
| 673 | GPPGPPGPPGTSGHPGSPGSPGYQGPPGEPGQAGPSGPPGPPGAIGPS |
| 674 | GPPGPPGTAGFPGSPGAK |
| 675 | GPPGPPGTAGFPGSPGAKGEVGPA |
| 676 | GPPGPSGPRGQPGVM |
| 677 | GPPGPSGPRGQPGVMGFPGPKGNDGAPGKN |
| 678 | GPPGSQGESGRPGPPGPSGPRGQPGVM |
| 679 | GPPGTAGFPGSPGAKGEVGPA |
| 680 | GPQGHAGAQGPPGPPGIN |
| 681 | GPRGAAGEPGRDGVPGGPGMRGMPG |
| 682 | GPRGAPGERGRPGLPGAA |
| 683 | GPRGAPGERGRPGLPGAAGA |
| 684 | GPRGAPGERGRPGLPGAAGAR |
| 685 | GPRGAPGERGRPGLPGAAGARGN |
| 686 | GPRGAPGERGRPGLPGAAGARGNDGARG |
| 687 | GPRGAPGERGRPGLPGAAGARGNDGARGSDGQPGPPGPPGTA |
| 688 | GPRGQPGVMGFPGPKGN |
| 689 | GPRGQPGVMGFPGPKGNDGAPGKN |
| 690 | GPSGPAGKDGESGRPGRPGERGLPGPPGIK |
| 691 | GPSGPAGKDGESGRPGRPGERGLPGPPGIKGPA |
| 692 | GPSGPPGPPGAIGPS |
| 693 | GPSGPRGQPGVMGFPGPKGNDGAPGKN |
| 694 | GQAGPSGPPGPPGAIGPS |
| 695 | GQPGPPGPPGTA |
| 696 | GQPGPPGPPGTAGFPGSPGAK |
| 697 | GQPGPPGPPGTAGFPGSPGAKGEVGPA |
| 698 | GQPGVMGFPGPK |
| 699 | GQPGVMGFPGPKGN |
| 700 | GQPGVMGFPGPKGNDGAPGKN |
| 701 | GQRGEPGPQGHAGAQGPPGPPGIN |
| 702 | GRDGVPGGPGMRGMPGSPGGPG |
| 703 | GRDGVPGGPGMRGMPGSPGGPGSDGKPGPPGSQGESGRPGPPGPSGPRGQPGVM |
| 704 | GRNGEKGETGAPGLKGENGLPGEN |
| 705 | GRNGEKGETGAPGLKGENGLPGENGAPGPMGPR |
| 706 | GRPGERGLPGPPGIK |
| 707 | GRPGERGLPGPPGIKGPA |
| 708 | GRPGLPGAAGAR |
| 709 | GRPGLPGAAGARGNDGARGSDGQPGPPGPPGTA |
| 710 | GRPGLPGAAGARGNDGARGSDGQPGPPGPPGTAGFPGSPGAK |
| 711 | GRPGLPGAAGARGNDGARGSDGQPGPPGPPGTAGFPGSPGAKGEVGPA |
| 712 | GRPGPPGPSGPRGQPGVM |
| 713 | GRPGRPGERGLPGPPGIK |
| 714 | GRPGRPGERGLPGPPGIKGPA |
| 715 | GSDGKPGPPGSQGESGRPGPPGPSGPRGQPGVM |
| 716 | GSDGQPGPPGPPGTA |
| 717 | GSDGQPGPPGPPGTAGFPGSPGAK |
| 718 | GSDGQPGPPGPPGTAGFPGSPGAKGEVGPA |
| 719 | GSNGAPGQRGEPGPQGHAGAQGPPGPPGIN |
| 720 | GSPGEPGANGLPGAAGERGAPGFRGPAGPN |
| 721 | GSPGGKGEMGPAGIPGAPG |
| 722 | GSPGGKGEMGPAGIPGAPGLM |
| 723 | GSPGGKGEMGPAGIPGAPGLMG |
| 724 | GSPGGKGEMGPAGIPGAPGLMGA |
| 725 | GSPGGKGEMGPAGIPGAPGLMGAR |
| 726 | GSPGGKGEMGPAGIPGAPGLMGARG |
| 727 | GSPGGKGEMGPAGIPGAPGLMGARGPPG |
| 728 | GSPGGKGEMGPAGIPGAPGLMGARGPPGPA |
| 729 | GSPGGKGEMGPAGIPGAPGLMGARGPPGPAG |
| 730 | GSPGGKGEMGPAGIPGAPGLMGARGPPGPAGAN |
| 731 | GSPGGKGEMGPAGIPGAPGLMGARGPPGPAGANGAPGLR |
| 732 | GSPGGKGEMGPAGIPGAPGLMGARGPPGPAGANGAPGLRGGAGEPGKN |
| 733 | GSPGGPGSDGKPGPPGSQGESGRPGPPGPSGPRGQPGVM |
| 734 | GSPGSNGAPGQRGEPGPQ |
| 735 | GSPGSNGAPGQRGEPGPQGHAGAQ |
| 736 | GSPGSNGAPGQRGEPGPQGHAGAQGP |
| 737 | GSPGSNGAPGQRGEPGPQGHAGAQGPP |
| 738 | GSPGSNGAPGQRGEPGPQGHAGAQGPPG |
| 739 | GSPGSNGAPGQRGEPGPQGHAGAQGPPGP |
| 740 | GSPGSNGAPGQRGEPGPQGHAGAQGPPGPP |
| 741 | GSPGSNGAPGQRGEPGPQGHAGAQGPPGPPG |
| 742 | GSPGSNGAPGQRGEPGPQGHAGAQGPPGPPGIN |
| 743 | GSPGSNGAPGQRGEPGPQGHAGAQGPPGPPGING |
| 744 | GSPGSNGAPGQRGEPGPQGHAGAQGPPGPPGINGS |
| 745 | GSPGSNGAPGQRGEPGPQGHAGAQGPPGPPGINGSPG |
| 746 | GSPGSNGAPGQRGEPGPQGHAGAQGPPGPPGINGSPGG |
| 747 | GSPGSNGAPGQRGEPGPQGHAGAQGPPGPPGINGSPGGK |
| 748 | GSPGSNGAPGQRGEPGPQGHAGAQGPPGPPGINGSPGGKG |
| 749 | GSPGSNGAPGQRGEPGPQGHAGAQGPPGPPGINGSPGGKGEM |
| 750 | GSPGSNGAPGQRGEPGPQGHAGAQGPPGPPGINGSPGGKGEMG |
| 751 | GSPGSNGAPGQRGEPGPQGHAGAQGPPGPPGINGSPGGKGEMGPA |
| 752 | GSPGSNGAPGQRGEPGPQGHAGAQGPPGPPGINGSPGGKGEMGPAGIPGAPGLM |
| 753 | GSPGSNGAPGQRGEPGPQGHAGAQGPPGPPGINGSPGGKGEMGPAGIPGAPGLMG |
| 754 | GSPGSNGAPGQRGEPGPQGHAGAQGPPGPPGINGSPGGKGEMGPAGIPGAPGLMGA |
| 755 | GSQGESGRPGPPGPSGPRGQPGVM |
| 756 | GTAGFPGSPGAKGEVGPA |
| 757 | GVPGGPGMRGMPGSPGGPGSDGKPGPPGSQ |
| 758 | GVPGGPGMRGMPGSPGGPGSDGKPGPPGSQGESGRPGPPGPSGPRGQPGVM |
| 759 | GYPGPAGPPGPPGPPGT |
| 760 | GYPGPAGPPGPPGPPGTS |
| 761 | GYPGPAGPPGPPGPPGTSGH |
| 762 | GYPGPAGPPGPPGPPGTSGHPG |
| 763 | GYPGPAGPPGPPGPPGTSGHPGSPGSPGYQGPPGEPGQAGPSGPPGPPGAIGPS |
| 764 | HAGAQGPPGPPGIN |
| 765 | HAGAQGPPGPPGINGSPG |
| 766 | HAGAQGPPGPPGINGSPGGKGEMG |
| 767 | HAGAQGPPGPPGINGSPGGKGEMGPA |
| 768 | HAGAQGPPGPPGINGSPGGKGEMGPAGIPGAPGLMGAR |
| 769 | HPGSPGSPGYQGPPGEPGQAGPSGPPGPPGAIGPS |
| 770 | HRGFDGRNGEKGETGAPGLKGEN |
| 771 | HRGFDGRNGEKGETGAPGLKGENGLPGENGAPGPMGPR |
| 772 | IGPSGPAGKDGESGRPGRPGERGLPGPPGIK |
| 773 | IKGPAGIPGFPG |
| 774 | IKGPAGIPGFPGMK |
| 775 | IPGAPGLMGARGPPGPAGANGAPGLR |
| 776 | IPGFPGMKGHRGFDGRN |
| 777 | KDGESGRPGRPGERGLPGPPGIK |
| 778 | KDGESGRPGRPGERGLPGPPGIKGPA |
| 779 | KDGSPGEPGANGLPGAAGERGAPGFRGPAGPN |
| 780 | KGENGLPGENGAPGPMGPR |
| 781 | KGPAGIPGFPGMK |
| 782 | KPGPPGSQGESGRPGPPGPSGPR |
| 783 | KPGPPGSQGESGRPGPPGPSGPRGQPGVM |
| 784 | LKGENGLPGENGAPGPMGPR |
| 785 | LMGARGPPGPAGANGAPGLR |
| 786 | LPGAAGARGNDGARGSDGQPGPPGPPGTA |
| 787 | LPGAAGERGAPGFRGPAGPN |
| 788 | LPGPPGIK |
| 789 | LPGPPGIKGPA |
| 790 | LPGPPGIKGPAGIPGFPGMK |
| 791 | MGARGPPGPAGANGAPGLR |
| 792 | MGARGPPGPAGANGAPGLRGGAGEPGKN |
| 793 | MGPAGIPGAPGLMGARGPPGPAGANGAPGLR |
| 794 | MGPRGAPGERGRPGLPGAAGAR |
| 795 | MPGSPGGPGSDGKPGPPGSQGESGRPGPPGPSGPRGQPGVM |
| 796 | MRGMPGSPGGPGSDGKPGPPGSQGESGRPGPPGPSGPRGQPGVM |
| 797 | NDGARGSDGQPGPPGPPGTA |
| 798 | NDGARGSDGQPGPPGPPGTAGFPGSPGAKGEVGPA |
| 799 | NGAPGPMGPRGAPGE |
| 800 | NGAPGPMGPRGAPGERGRPGLPGAAGAR |
| 801 | NGEKGETGAPGLKGENGLPGENGAPGPMGPR |
| 802 | NGETGPQGPPGPTGPGGD |
| 803 | NGLPGENGAPGPMGPR |
| 804 | NGSPGGKGEMGPAGIPGAPGLM |
| 805 | NGSPGGKGEMGPAGIPGAPGLMGARGPPGPAGANGAPGLR |
| 806 | PAGIPGAPGLM |
| 807 | PAGIPGAPGLMG |
| 808 | PAGIPGFPGMK |
| 809 | PAGIPGFPGMKG |
| 810 | PAGIPGFPGMKGHR |
| 811 | PAGIPGFPGMKGHRG |
| 812 | PAGIPGFPGMKGHRGF |
| 813 | PAGIPGFPGMKGHRGFDG |
| 814 | PAGIPGFPGMKGHRGFDGRN |
| 815 | PAGKDGESGRPGRPGERGLPGPPGIK |
| 816 | PGAAGERGAPGFRGPAGPN |
| 817 | PGANGLPGAAGERGAP |
| 818 | PGAPGLMGARGPPGPAGANGAPGLR |
| 819 | PGEPGPKGDAGAPGAPGGKGDAGAPGE |
| 820 | PGERGLPGPPGIK |
| 821 | PGERGRPGLPGAAGAR |
| 822 | PGFPGMKGH |
| 823 | PGFPGMKGHR |
| 824 | PGFPGMKGHRGF |
| 825 | PGFPGMKGHRGFDGR |
| 826 | PGLMGARGPPGPAGANGAPGL |
| 827 | PGLPGAAGARGNDGARGSDGQPGPPGPPGTAGFPGSPGAKG |
| 828 | PGPAGANGAPGLRGGAGEPGKN |
| 829 | PGPAGPPGPPGPPG |
| 830 | PGPAGPPGPPGPPGTS |
| 831 | PGPAGPPGPPGPPGTSG |
| 832 | PGPAGPPGPPGPPGTSGH |
| 833 | PGPAGPPGPPGPPGTSGHPGSPGSPGYQGPPGEPGQAGPSGP |
| 834 | PGPAGPPGPPGPPGTSGHPGSPGSPGYQGPPGEPGQAGPSGPPGPPGAIGPSGPAGK |
| 835 | PGPMGPRGAPGERGRPGLPGAAGAR |
| 836 | PGPPGAIGPS |
| 837 | PGPPGIKGPAGIPGFPGMK |
| 838 | PGPPGPPGTAGFPGSPGAK |
| 839 | PGPPGPSGPRGQPGVM |
| 840 | PGRPGERGLPGPPGIK |
| 841 | PGSDGKPGPPGSQGESGRPGPPGPSGPRGQPGVM |
| 842 | PGSNGAPGQRGEPGPQGHAGAQGPPGPPGINGS |
| 843 | PPGAIGPSGPAGKDGESGRPGRPGER |
| 844 | PPGAIGPSGPAGKDGESGRPGRPGERGLPGPPGIK |
| 845 | PPGEPGQAGPSGPPGPPGAIGPS |
| 846 | PPGEPGQAGPSGPPGPPGAIGPSGPAGKD |
| 847 | PPGIKGPAGIPGFPGMK |
| 848 | PPGINGSPGGKGEMGPAGIPGAPGLM |
| 849 | PPGPAGANGAPGLR |
| 850 | PPGPPGAIGPS |
| 851 | PPGPPGAIGPSGPAGKDGESGRPGRPGERGLPGPPGIK |
| 852 | PPGPPGINGSPGGKGEMGPAGIPGAPGLM |
| 853 | PPGPPGTAGFPGSPGAKGEVGPA |
| 854 | PPGSQGESGRPGPPGPSGPRGQPGVM |
| 855 | PPGTAGFPGSPGAKGEVGPA |
| 856 | PQGHAGAQGPPGPPGIN |
| 857 | PSGPAGKDGESGRPGRPGERGLPGPPGIK |
| 858 | PSGPPGPPGAIGPS |
| 859 | QAGPSGPPGPPGAIGPS |
| 860 | QGPPGEPGQAGPSGPPGPPGAIGPSGPAGKD |
| 861 | QRGEPGPQGHAGAQGPPGPPGIN |
| 862 | RGFDGRNGEKGETGAPGLKGEN |
| 863 | RGLPGPPGIK |
| 864 | RGLPGPPGIKGPA |
| 865 | RGLPGPPGIKGPAGIPGFPGMK |
| 866 | RGMPGSPGGPGSDGKPGPPGSQGESGRPGPPGPSGPRGQPGVM |
| 867 | RGNDGARGSDGQPGPPGPPGTA |
| 868 | RGNDGARGSDGQPGPPGPPGTAGFPGSPGAK |
| 869 | RGNDGARGSDGQPGPPGPPGTAGFPGSPGAKGEVGPA |
| 870 | RGPPGPAGANGAPGL |
| 871 | RGPPGPAGANGAPGLR |
| 872 | RGPPGPAGANGAPGLRG |
| 873 | RGPPGPAGANGAPGLRGGAGEPGKN |
| 874 | RGPPGPAGANGAPGLRGGAGEPGKNGAK |
| 875 | RGSDGQPGPPGPPGTAGFPGSPGAK |
| 876 | RGSDGQPGPPGPPGTAGFPGSPGAKGEVGPA |
| 877 | RPGERGLPGPPGIK |
| 878 | RPGERGLPGPPGIKGPA |
| 879 | RPGLPGAAGARGNDGARGSDGQPGPPGP |
| 880 | RPGLPGAAGARGNDGARGSDGQPGPPGPPGTA |
| 881 | RPGPPGPSGPRGQPGVM |
| 882 | RPGRPGERGLPGPPGIK |
| 883 | RPGRPGERGLPGPPGIKGPA |
| 884 | SDGKPGPPGSQGESGRPGPPGPS |
| 885 | SDGKPGPPGSQGESGRPGPPGPSG |
| 886 | SDGKPGPPGSQGESGRPGPPGPSGPR |
| 887 | SDGKPGPPGSQGESGRPGPPGPSGPRG |
| 888 | SDGKPGPPGSQGESGRPGPPGPSGPRGQPG |
| 889 | SDGKPGPPGSQGESGRPGPPGPSGPRGQPGVM |
| 890 | SDGKPGPPGSQGESGRPGPPGPSGPRGQPGVMGFPGPKGN |
| 891 | SDGQPGPPGPPGTA |
| 892 | SDGQPGPPGPPGTAGFPGSPGAK |
| 893 | SDGQPGPPGPPGTAGFPGSPGAKGEVGPA |
| 894 | SGPAGKDGESGRPGRPGERGLPGPPGIK |
| 895 | SGPPGPPGAIGPS |
| 896 | SGPPGPPGAIGPSGPAGKD |
| 897 | SGPPGPPGAIGPSGPAGKDGESGRPGRPGER |
| 898 | SGPPGPPGAIGPSGPAGKDGESGRPGRPGERGLPGPPGIK |
| 899 | SGPPGPPGAIGPSGPAGKDGESGRPGRPGERGLPGPPGIKGPA |
| 900 | SGPRGQPGVMGFPGPKGN |
| 901 | SGRPGPPGPSGPRGQPGVM |
| 902 | SGRPGPPGPSGPRGQPGVMGFPGPKGN |
| 903 | SGRPGRPGERGLPGPP |
| 904 | SGRPGRPGERGLPGPPG |
| 905 | SGRPGRPGERGLPGPPGIK |
| 906 | SGRPGRPGERGLPGPPGIKGPA |
| 907 | SNGAPGQRGEPGPQGHAGAQGPPGPPGIN |
| 908 | SNGAPGQRGEPGPQGHAGAQGPPGPPGINGSPGGK |
| 909 | SNGAPGQRGEPGPQGHAGAQGPPGPPGINGSPGGKGEMGPA |
| 910 | SPGAKGEVGPAGSPGSNGAPG |
| 911 | SPGAKGEVGPAGSPGSNGAPGQ |
| 912 | SPGAKGEVGPAGSPGSNGAPGQRGE |
| 913 | SPGAKGEVGPAGSPGSNGAPGQRGEPG |
| 914 | SPGAKGEVGPAGSPGSNGAPGQRGEPGPQ |
| 915 | SPGAKGEVGPAGSPGSNGAPGQRGEPGPQG |
| 916 | SPGAKGEVGPAGSPGSNGAPGQRGEPGPQGH |
| 917 | SPGAKGEVGPAGSPGSNGAPGQRGEPGPQGHAG |
| 918 | SPGAKGEVGPAGSPGSNGAPGQRGEPGPQGHAGAQGPPGPPGIN |
| 919 | SPGEPGANGLPGAAGERGAPGFRGPAGPN |
| 920 | SPGGKGEMGPAGIPGAPGLM |
| 921 | SPGGKGEMGPAGIPGAPGLMGA |
| 922 | SPGGKGEMGPAGIPGAPGLMGAR |
| 923 | SPGGKGEMGPAGIPGAPGLMGARGPPGPAGAN |
| 924 | SPGGPGSDGKPGPPGSQGESGRPGPPG |
| 925 | SPGGPGSDGKPGPPGSQGESGRPGPPGP |
| 926 | SPGGPGSDGKPGPPGSQGESGRPGPPGPS |
| 927 | SPGGPGSDGKPGPPGSQGESGRPGPPGPSGPR |
| 928 | SPGGPGSDGKPGPPGSQGESGRPGPPGPSGPRG |
| 929 | SPGGPGSDGKPGPPGSQGESGRPGPPGPSGPRGQPGVM |
| 930 | SPGGPGSDGKPGPPGSQGESGRPGPPGPSGPRGQPGVMGFPGPKGN |
| 931 | SPGSNGAPGQRGEPGPQGHAGAQGPPG |
| 932 | SPGSNGAPGQRGEPGPQGHAGAQGPPGPPGIN |
| 933 | SPGSNGAPGQRGEPGPQGHAGAQGPPGPPGINGSPG |
| 934 | SPGSNGAPGQRGEPGPQGHAGAQGPPGPPGINGSPGGK |
| 935 | SPGSNGAPGQRGEPGPQGHAGAQGPPGPPGINGSPGGKGEMG |
| 936 | SPGSNGAPGQRGEPGPQGHAGAQGPPGPPGINGSPGGKGEMGPA |
| 937 | SPGSPGYQGPPGEPGQAGPSGPPGPPGAIGPS |
| 938 | SPGYQGPPGEPGQAGPSGPPGPPGAIGPS |
| 939 | SQGESGRPGPPGPSGPRGQPGVM |
| 940 | SQGESGRPGPPGPSGPRGQPGVMGFPGPKGN |
| 941 | TAGFPGSPGAKGEVGPA |
| 942 | TAGFPGSPGAKGEVGPAG |
| 943 | TAGFPGSPGAKGEVGPAGSPG |
| 944 | TAGFPGSPGAKGEVGPAGSPGSN |
| 945 | TGAPGLKGENGLPGENGAPGPMGPR |
| 946 | TGPQGPPGPTGPGGD |
| 947 | VGPAGSPGSNGAPGQRGEPGPQG |
| 948 | GHPGSPGSPGYQGPPGEPGQAGPSGPPGPPGAIGPSGPAGKD |
| 949 | GNDGARGSDGQPGPPGPPGTAGFPGSPGAKGEVGP |
| 950 | GFPGPKGNDGAPGKNGERGGPGGPGPQGPPGKNGETGPQGPPGPTGPGGD |
| 951 | GSPGSNGAPGQRGEPGPQGHAGAQGPPGPPGINGSPGGKGEMGPAG |
| 952 | GNDGARGSDGQPGPPGPPGTAGFPGSPGAKGE |
| 953 | GNDGARGSDGQPGPPGPPGTAGFPGSPGAKGEVGPAGSPGSNG |
| 954 | PGPKGNDGAPGKNGERGGPGGPGPQGPPGKN |
| 955 | GTSGHPGSPGSPGYQGPPGEPGQAGPSGPPGPPGAIGPS |
| 956 | GHPGSPGSPGYQGPPGEPGQAGPSGPPGPPGAIGPSGPAGKDGES |
| 957 | GNDGARGSDGQPGPPGPPGTAGFPGSPGAKGEVGPAGSPGSNGAPGQ |
| 958 | PGSPGAKGEVGPA |
| 959 | GAPGLRGGAGEPGKN |
| 960 | GIPGAPGLMGARGPPGPAGA |
| 961 | GFPGSPGAKGEVGPAGSPGSNGAPGQ |
| 962 | PGPKGNDGAPGKN |
| 963 | GEVGPAGSPGSNGAPGQR |

TABLE 2

| SEQ ID | |
|---|---|
| NO. | Sequences |
| 29 | AGYPGPAGPPGPPGPPGTS |
| 30 | AGYPGPAGPPGPPGPPGTSGHPGSPGSPGYQGPPGEPGQAGPSGPPGPPGAIGPS |
| 53 | ARGPPGPAGANGAPGLR |
| 75 | DGARGSDGQPGPPGPPGTAGFPGSPGAK |
| 77 | DGARGSDGQPGPPGPPGTAGFPGSPGAKGEVGPA |
| 86 | DGRNGEKGETGAPGLK |
| 86 | DGRNGEKGETGAPGLK |
| 88 | DGRNGEKGETGAPGLKGENGLPGENGAPGPMGPR |
| 89 | DGRNGEKGETGAPGLKGENGLPGENGAPGPMGPRGAPGERGRPGLPGAA |
| 137 | GANGAPGLRGGAGEPGKN |
| 163 | GAPGERGRPGLPGAAGARGNDGARGSDGQPGPPGPPGTA |
| 164 | GAPGERGRPGLPGAAGARGNDGARGSDGQPGPPGPPGTAGFPGSPGAK |
| 166 | GAPGERGRPGLPGAAGARGNDGARGSDGQPGPPGPPGTAGFPGSPGAKGEVGPA |
| 189 | GAPGQRGEPGPQGHAGAQGPPGPPGIN |
| 197 | GAPGQRGEPGPQGHAGAQGPPGPPGINGSPGGKGEMGPA |
| 204 | GARGNDGARGSDGQPGPPGPPGTA |
| 207 | GARGNDGARGSDGQPGPPGPPGTAGFPGSPGAK |
| 208 | GARGNDGARGSDGQPGPPGPPGTAGFPGSPGAKGEVGPA |
| 211 | GARGNDGARGSDGQPGPPGPPGTAGFPGSPGAKGEVGPAGSPGSN |
| 212 | GARGPPGPAGAN |
| 214 | GARGPPGPAGANGAPGLR |
| 221 | GARGPPGPAGANGAPGLRGGAGEPGKN |
| 224 | GARGPPGPAGANGAPGLRGGAGEPGKNGAK |
| 229 | GARGSDGQPGPPGPPGTA |
| 231 | GARGSDGQPGPPGPPGTAGFPGSPGAKGEVGPA |
| 236 | GEKGETGAPGLKGENGLPGENGAPGPMGPR |
| 238 | GEMGPAGIPGAPGLM |
| 239 | GEMGPAGIPGAPGLMGAR |
| 241 | GEMGPAGIPGAPGLMGARGPPGPAGAN |
| 245 | GENGLPGENGAPGPMGPR |
| 258 | GEPGPQGHAGAQGPPGPPGIN |
| 262 | GEPGQAGPSGPPGPPGAIGPS |
| 269 | GERGGPGGPGPQGPPGKN |
| 271 | GERGGPGGPGPQGPPGKNGETGP |
| 272 | GERGGPGGPGPQGPPGKNGETGPQ |
| 273 | GERGGPGGPGPQGPPGKNGETGPQG |
| 275 | GERGGPGGPGPQGPPGKNGETGPQGPPG |
| 278 | GERGGPGGPGPQGPPGKNGETGPQGPPGPTG |
| 279 | GERGGPGGPGPQGPPGKNGETGPQGPPGPTGPG |
| 280 | GERGGPGGPGPQGPPGKNGETGPQGPPGPTGPGG |
| 282 | GERGGPGGPGPQGPPGKNGETGPQGPPGPTGPGGDK |
| 283 | GERGGPGGPGPQGPPGKNGETGPQGPPGPTGPGGDKG |
| 284 | GERGGPGGPGPQGPPGKNGETGPQGPPGPTGPGGDKGD |
| 285 | GERGGPGGPGPQGPPGKNGETGPQGPPGPTGPGGDKGDTG |
| 289 | GERGGPGGPGPQGPPGKNGETGPQGPPGPTGPGGDKGDTGPPGPQGLQ |
| 316 | GEVGPAGSPGSNGAPGQRGEPGPQ |
| 317 | GEVGPAGSPGSNGAPGQRGEPGPQG |
| 322 | GEVGPAGSPGSNGAPGQRGEPGPQGHAGAQ |
| 323 | GEVGPAGSPGSNGAPGQRGEPGPQGHAGAQG |
| 326 | GEVGPAGSPGSNGAPGQRGEPGPQGHAGAQGPPG |
| 330 | GEVGPAGSPGSNGAPGQRGEPGPQGHAGAQGPPGPPGIN |
| 339 | GEVGPAGSPGSNGAPGQRGEPGPQGHAGAQGPPGPPGINGSPGGKGEMGPA |
| 341 | GFDGRNGEKGETGAPGLK |
| 346 | GFDGRNGEKGETGAPGLKGENGLPGENGAPGPMGPR |
| 350 | GFPGPKGNDGAPGKN |
| 351 | GFPGPKGNDGAPGKNGER |
| 356 | GFPGPKGNDGAPGKNGERGGPGG |
| 360 | GFPGPKGNDGAPGKNGERGGPGGPGPQ |
| 364 | GFPGPKGNDGAPGKNGERGGPGGPGPQGPPG |
| 366 | GFPGPKGNDGAPGKNGERGGPGGPGPQGPPGKN |
| 368 | GFPGPKGNDGAPGKNGERGGPGGPGPQGPPGKNGE |
| 370 | GFPGPKGNDGAPGKNGERGGPGGPGPQGPPGKNGETG |
| 372 | GFPGPKGNDGAPGKNGERGGPGGPGPQGPPGKNGETGPQ |
| 373 | GFPGPKGNDGAPGKNGERGGPGGPGPQGPPGKNGETGPQG |
| 374 | GFPGPKGNDGAPGKNGERGGPGGPGPQGPPGKNGETGPQGPPG |
| 375 | GFPGPKGNDGAPGKNGERGGPGGPGPQGPPGKNGETGPQGPPGPTG |
| 379 | GFPGSPGAKGEVGPA |
| 382 | GFPGSPGAKGEVGPAGSPG |
| 383 | GFPGSPGAKGEVGPAGSPGSN |
| 384 | GFPGSPGAKGEVGPAGSPGSNG |
| 385 | GFPGSPGAKGEVGPAGSPGSNGA |
| 387 | GFPGSPGAKGEVGPAGSPGSNGAPGQR |
| 390 | GFPGSPGAKGEVGPAGSPGSNGAPGQRGEP |
| 391 | GFPGSPGAKGEVGPAGSPGSNGAPGQRGEPG |
| 392 | GFPGSPGAKGEVGPAGSPGSNGAPGQRGEPGPQ |
| 398 | GFPGSPGAKGEVGPAGSPGSNGAPGQRGEPGPQGHAGAQ |
| 399 | GFPGSPGAKGEVGPAGSPGSNGAPGQRGEPGPQGHAGAQG |
| 403 | GFPGSPGAKGEVGPAGSPGSNGAPGQRGEPGPQGHAGAQGPPGPPGIN |
| 406 | GFPGSPGAKGEVGPAGSPGSNGAPGQRGEPGPQGHAGAQGPPGPPGINGSPGGK |
| 420 | GGPGSDGKPGPPGSQGESGRPGPPGPSGPRGQPGVM |
| 426 | GHAGAQGPPGPPGINGSPGGKGEMGPA |
| 432 | GHAGAQGPPGPPGINGSPGGKGEMGPAGIPGAPGLMGARGPPGPAGAN |
| 433 | GHAGAQGPPGPPGINGSPGGKGEMGPAGIPGAPGLMGARGPPGPAGANGAPGLR |
| 435 | GHPGSPGSPGYQGPPGEPGQA |
| 437 | GHPGSPGSPGYQGPPGEPGQAGPS |
| 438 | GHPGSPGSPGYQGPPGEPGQAGPSGPPGPPGAIGPS |
| 439 | GHPGSPGSPGYQGPPGEPGQAGPSGPPGPPGAIGPSGPA |
| 441 | GHRGFDGRNGEKGETGAPGLK |
| 445 | GHRGFDGRNGEKGETGAPGLKGENGLPGENGAPGPMGPR |
| 452 | GIPGAPGLMGA |
| 457 | GIPGAPGLMGARGPPGPAGAN |
| 493 | GKGEMGPAGIPGAPGLM |
| 508 | GLAGYPGPAGPPGPPGPPGTS |
| 509 | GLAGYPGPAGPPGPPGPPGTSGHPGSPGSPGYQGPPGEPGQAGPSGPPGPPGAIGPS |
| 511 | GLMGARGPPGPAGANGAPGLR |
| 538 | GLPGPPGIKGPA |
| 544 | GLPGPPGIKGPAGIPGFPGMK |
| 547 | GLPGPPGIKGPAGIPGFPGMKGHR |
| 560 | GNDGARGSDGQPGPPGPPGTA |
| 562 | GNDGARGSDGQPGPPGPPGTAGF |
| 563 | GNDGARGSDGQPGPPGPPGTAGFPG |
| 565 | GNDGARGSDGQPGPPGPPGTAGFPGSPGAK |
| 566 | GNDGARGSDGQPGPPGPPGTAGFPGSPGAKG |
| 567 | GNDGARGSDGQPGPPGPPGTAGFPGSPGAKGEVG |
| 568 | GNDGARGSDGQPGPPGPPGTAGFPGSPGAKGEVGPA |
| 572 | GNDGARGSDGQPGPPGPPGTAGFPGSPGAKGEVGPAGSPGSN |
| 573 | GNDGARGSDGQPGPPGPPGTAGFPGSPGAKGEVGPAGSPGSNGAPGQR |
| 574 | GNDGARGSDGQPGPPGPPGTAGFPGSPGAKGEVGPAGSPGSNGAPGQRGE |
| 575 | GNDGARGSDGQPGPPGPPGTAGFPGSPGAKGEVGPAGSPGSNGAPGQRGEPGPQ |
| 578 | GPAGIPGAPGLM |
| 583 | GPAGIPGFP |
| 586 | GPAGIPGFPGMK |
| 587 | GPAGIPGFPGMKG |
| 588 | GPAGIPGFPGMKGH |
| 589 | GPAGIPGFPGMKGHR |
| 591 | GPAGIPGFPGMKGHRGF |
| 607 | GPAGIPGFPGMKGHRGFDGRNGEKGETGAPGLK |
| 609 | GPAGIPGFPGMKGHRGFDGRNGEKGETGAPGLKGEN |
| 626 | GPGSDGKPGPPGSQGESGRPGPPGPSGPRGQPGVM |
| 634 | GPPGEPGQAGPSGPPGPPGAIGPS |
| 635 | GPPGEPGQAGPSGPPGPPGAIGPSGPAGKD |
| 639 | GPPGPAGANGAPGLR |
| 648 | GPPGPAGANGAPGLRGGAGEPGKN |
| 662 | GPPGPPGAIGPS |
| 666 | GPPGPPGINGSPGGKGEMGPA |
| 667 | GPPGPPGINGSPGGKGEMGPAGIPGAPGLM |
| 673 | GPPGPPGPPGTSGHPGSPGSPGYQGPPGEPGQAGPSGPPGPPGAIGPS |
| 675 | GPPGPPGTAGFPGSPGAKGEVGPA |
| 678 | GPPGSQGESGRPGPPGPSGPRGQPGVM |
| 679 | GPPGTAGFPGSPGAKGEVGPA |
| 709 | GRPGLPGAAGARGNDGARGSDGQPGPPGPPGTA |
| 717 | GSDGQPGPPGPPGTAGFPGSPGAK |
| 718 | GSDGQPGPPGPPGTAGFPGSPGAKGEVGPA |
| 722 | GSPGGKGEMGPAGIPGAPGLM |
| 724 | GSPGGKGEMGPAGIPGAPGLMGA |
| 725 | GSPGGKGEMGPAGIPGAPGLMGAR |
| 728 | GSPGGKGEMGPAGIPGAPGLMGARGPPGPA |
| 730 | GSPGGKGEMGPAGIPGAPGLMGARGPPGPAGAN |
| 734 | GSPGSNGAPGQRGEPGPQ |
| 739 | GSPGSNGAPGQRGEPGPQGHAGAQGPPGP |
| 741 | GSPGSNGAPGQRGEPGPQGHAGAQGPPGPPG |
| 742 | GSPGSNGAPGQRGEPGPQGHAGAQGPPGPPGIN |
| 743 | GSPGSNGAPGQRGEPGPQGHAGAQGPPGPPGING |
| 745 | GSPGSNGAPGQRGEPGPQGHAGAQGPPGPPGINGSPG |
| 747 | GSPGSNGAPGQRGEPGPQGHAGAQGPPGPPGINGSPGGK |
| 750 | GSPGSNGAPGQRGEPGPQGHAGAQGPPGPPGINGSPGGKGEMG |
| 751 | GSPGSNGAPGQRGEPGPQGHAGAQGPPGPPGINGSPGGKGEMGPA |
| 752 | GSPGSNGAPGQRGEPGPQGHAGAQGPPGPPGINGSPGGKGEMGPAGIPGAPGLM |
| 754 | GSPGSNGAPGQRGEPGPQGHAGAQGPPGPPGINGSPGGKGEMGPAGIPGAPGLMGA |
| 756 | GTAGFPGSPGAKGEVGPA |
| 760 | GYPGPAGPPGPPGPPGTS |
| 763 | GYPGPAGPPGPPGPPGTSGHPGSPGSPGYQGPPGEPGQAGPSGPPGPPGAIGPS |
| 791 | MGARGPPGPAGANGAPGLR |
| 871 | RGPPGPAGANGAPGLR |
| 889 | SDGKPGPPGSQGESGRPGPPGPSGPRGQPGVM |
| 893 | SDGQPGPPGPPGTAGFPGSPGAKGEVGPA |
| 895 | SGPPGPPGAIGPS |
| 920 | SPGGKGEMGPAGIPGAPGLM |
| 937 | SPGSPGYQGPPGEPGQAGPSGPPGPPGAIGPS |
| 939 | SQGESGRPGPPGPSGPRGQPGVM |
| 948 | GHPGSPGSPGYQGPPGEPGQAGPSGPPGPPGAIGPSGPAGKD |
| 964 | GYPGPAGPPGPPGPPGTSGHPGSPGSPGYQGPPGEPGQAGPSGPPGPPGAIGPSGPA |
| 965 | GEKGETGAPGLKGENGLPGENGAPGPMGPRGAPGERGRPGLPGAA |
| 966 | GGAGEPGKNGAKGEPGPRGERGEAGIPGVPGAKGEDGKDG |
| 967 | GGAGEPGKNGAKGEPGPRGERGEAGIPGVPGAKGEDGKDGSPGEPGAN |
| 968 | GHRGFDGRNGEKGETGAPGLKGENGLPGENGAPGPM |
| 969 | DGQPGPPGPPGTAGFPGSPGAKGEVGPA |
| 970 | ARGSDGQPGPPGPPGTAGFPGSPGAKGEVGPA |
| 971 | GNDGARGSDGQPGPPGPPGTAGFPGSPG |
| 972 | GNDGARGSDGQPGPPGPPG |

[0073] In some embodiments, the collagen fragment sequence variant described herein can have an amino acid sequence provided below in Table 4. In some embodiments, the collagen fragment sequence variant described herein can have an amino acid sequence that is encoded by a nucleic acid sequence set forth below in Table 5. The relationship between the amino acid sequence, the nucleic acid sequence encoding the amino acid sequence, and the sequence similarity to SEQ ID NO: 986 is provided below in Table 3.

TABLE 3

| | | % Protein Sequence |
|---|---|---|
| AA SEQ | DNA SEQ | similarity to SEQ ID |
| ID NO. | ID NO: | NO: 986 |
| 987 | 1016 | 100% |
| 988 | 1017 | 92% |
| 989 | 1018 | 90% |
| 990 | 1019 | 98% |
| 991 | 1020 | 90% |
| 992 | 1021 | 96% |
| 993 | 1022 | 90% |
| 994 | 1023 | 100% |
| 995 | 1024 | 77% |
| 996 | 1025 | 77% |
| 997 | 1026 | 68% |
| 998 | 1027 | 99% |
| 999 | 1028 | 92% |
| 1000 | 1029 | 94% |
| 1001 | 1030 | 90% |
| 1002 | 1031 | 99% |
| 1003 | 1032 | 93% |
| 1004 | 1033 | 90% |
| 1005 | 1034 | 99% |
| 1006 | 1035 | 96% |
| 1007 | 1036 | 91% |
| 1008 | 1037 | 90% |
| 1009 | 1038 | 100% |
| 1010 | 1039 | 98% |
| 1011 | 1040 | 98% |
| 1012 | 1041 | 96% |
| 1013 | 1042 | 90% |
| 1014 | 1043 | 91% |
| 1015 | 1044 | 99% |

TABLE 4

| SEQ ID | |
|---|---|
| NO. | Sequences |
| 987 | DVKSGVAVGGLAGYPGPAGPPGPPGPPGTSGHPGSPGSPGYQGPPGEPGQAGPSGPP |
| | GPPGAIGPSGPAGKDGESGRPGRPGERGLPGPPGIKGPAGIPGFPGMKGHRGFDGRN |
| | GEKGETGAPGLKGENGLPGENGAPGPMGPRGAPGERGRPGLPGAAGARGNDGARGSD |
| | GQPGPPGPPGTAGFPGSPGAKGEVGPAGSPGSNGAPGQRGEPGPQGHAGAQGPPGPP |
| | GINGSPGGKGEMGPAGIPGAPGLMGARGPPGPAGANGAPGLRGGAGEPGKNGAKGEP |
| | GPRGERGEAGIPGVPGAKGEDGKDGSPGEPGANGLPGAAGERGAPGFRGPAGPNGIP |
| | GEKGPAGERGAPGPAGPRGAAGEPGRDGVPGGPGMRGMPGSPGGPGSDGKPGPPGSQ |
| | GESGRPGPPGPSGPRGQPGVMGFPGPKGNDGAPGKNGERGGPGGPGPQGPPGKNGET |
| | GPQGPPGPTGPGGDKGDTGPPGPQGLQGLPGTGGPPGENGKPGEPGPKGDAGAPGAP |
| | GGKGDAGAPGERGPPAIAGIGGEKAGGFAPYYG |
| 988 | DVKSGVAVGGLAGYPGPAGAPGPPGPPGASGHPGSPGAPGYQGPPGAPGQAGPSGAP |
| | GPPGAIGASGPAGKDGASGRPGRPGERGLPGPPGAKGPAGIPGAPGMKGHRGFDGRN |
| | GEKGATGAPGLKGANGLPGENGAPGPMGPRGAPGERGRPGAPGAAGARGADGARGSD |
| | GAPGPPGPPGAAGFPGSPGAKGEVGPAGAPGSNGAPGARGEPGPQGAAGAQGPPGAP |
| | GINGSPGAKGEMGPAGAPGAPGLMGARGPPGPAGANGAPGLRGAAGEPGKNGAKGEP |
| | GPRGARGEAGIPGAPGAKGEDGADGSPGEPGANGLPGAAGARGAPGFRGAAGPNGIP |
| | GAKGPAGERGAPGPAGPRGAAGEPGRDGAPGGPGMRGAPGSPGGPGADGKPGPPGAQ |
| | GESGRPGAPGPSGPRGAPGVMGFPGAKGNDGAPGANGERGGPGAPGPQGPPGANGET |
| | GPQGAPGPTGPGGAKGDTGPPGAQGLQGLPGAGGPPGENGAPGEPGPKGAAGAPGAP |
| | GAKGDAGAPGERGPPAIAGIGGEKAGGFAPYYG |
| 989 | DVKSGVAVGGLAGYPGPAGPPGPPGPPGTSGHPGSPGSPGYQGPPGEPGQAGPSGPP |
| | GPPGAIGPSGPAGKDGESGRPGRPGERGLPGPPGIKGPAGIPGFPGMKGHRGFDGRN |
| | GEKGETGAPGLKGENGLPGENGAPGPMGPRGAPGERGRPGLPGAAGARGNDGARGSD |
| | GQPGPPGPPGTAGFPGSPGAKGEVGPAGSPGSNGAPGQRGEPGPQGHAGAQGPPGPP |
| | GINGSPGGKGEMGPAGIPGAPGLMGARGPPGPAGANGAPGLRGGAGEPGKNGAKGEP |
| | GPRGERGEAGIPGVPGAKGEDGKDGSPGEPGANGLPGAAGERGAPGFRGPAGPNGIP |
| | GEKGPAGERGAPGPAGPRGAAGEPGRDGEPGLMGPRGLPGSPGGPGPAGKEGPVGLP |
| | GIDGRPGPIGPAGARGEPGVMGFPGPKGNDGDPGKNGDKGHAGLAGARGAPGPDGET |
| | GAQGPPGPQGVQGGKGEQGPAGPPGFQGLPGTGGPAGEVGKPGEQGLHGEFGLPGPA |
| | GPRGERGAPGERGPPAIAGIGGEKAGGFAPYYG |
| 990 | DVKSGVAVGGLAGYPGPAGPPGPPGPPGTSGHPGSPGSPGYQGPPGEPGQAGPSGPP |
| | GPPGAIGPSGPAGKRGESGRPGRPGERGLPGPPGIKGPAGIPGFPGMKGHRGFRGRN |
| | GEKGETGAPGLKGENGLPGENGAPGPMGPRGAPGERGRPGLPGAAGARGNRGARGSD |
| | GQPGPPGPPGTAGFPGSPGAKGRVGPAGSPGSNGAPGQRGEPGPQGHAGAQGPPGPP |
| | GINGSPGGKGEMGPAGIPGAPGLMGARGPPGPAGANGAPGLRGGAGRPGKNGAKGEP |
| | GPRGERGRAGIPGVPGAKGERGKDGSPGEPGANGLPGAAGERGAPGFRGPAGPNGIP |
| | GEKGPAGERGAPGPAGPRGAAGEPGRRGVPGGPGMRGMPGSPGGPGSRGKPGPPGSQ |
| | GESGRPGPPGPSGPRGQPGVMGFPGPKGNDGAPGKNGERGGPGGPGPQGPPGKNGET |
| | GPQGPPGPTGPGGRKGDTGPPGPQGLQGLPGTGGPPGENGKPGRPGPKGDAGAPGAP |
| | GGKGRAGAPGERGPPAIAGIGGEKAGGFAPYYG |
| 991 | DVKSGVAVGGLAGYPGPAGPPGPPGPPGASGHPGSPGSPGYQGPPGEPGQAGPAGP |
| | PGPPGAIGPSGPAGKDGESGRPGRPGERGLPGPPGIKGPAGIPGFPGMKGHRGFDGR |
| | NGEKGEAGAPGLKGENGLPGENGAPGPMGPRGAPGERGRPGLPGAAGARGNDGARGS |
| | DGQPGPPGPPGAAGFPGAPGAKGEVGPAGSPGSNGAPGQRGEPGPQGHAGAQGPPGP |
| | PGINGSPGGKGEMGPAGIPGAPGLMGARGPPGPAGANGAPGLRGGAGEPGKNGAKGE |
| | PGPRGERGEAGIPGVPGAKGEDGKDGSPGEPGANGLPGAAGERGAPGFRGPAGPNGI |
| | PGEKGPAGERGAPGPAGPRGAAGEPGRDGVPGGPGMRGMPGSPGGPGSDGKPGPPGA |
| | QGESGRPGPPGPSGPRGQPGVMGFPGPKGNDGAPGKNGERGGPGGPGPQGPPGKNGE |
| | TGPQGPPGPTGPGGDKGDTGPPGPQGLQGLPGTGGPPGENGKPGEPGPKGDAGAPGA |
| | PGGKGDAGAPGERGPPAIAGIGGEKAGGFAPYYG |
| 992 | DVKSGVAVGGLAGYPGPAGPPGPPGPPGNSGHPGSPGSPGYQGPPGEPGQAGPNGPP |
| | GPPGAIGPSGPAGKDGESGRPGRPGERGLPGPPGIKGPAGIPGFPGMKGHRGFDGRN |
| | GEKGENGAPGLKGENGLPGENGAPGPMGPRGAPGERGRPGLPGAAGARGNDGARGSD |
| | GQPGPPGPPGNAGFPGNPGAKGEVGPAGSPGSNGAPGQRGEPGPQGHAGAQGPPGPP |
| | GINGSPGGKGEMGPAGIPGAPGLMGARGPPGPAGANGAPGLRGGAGEPGKNGAKGEP |
| | GPRGERGEAGIPGVPGAKGEDGKDGSPGEPGANGLPGAAGERGAPGFRGPAGPNGIP |
| | GEKGPAGERGAPGPAGPRGAAGEPGRDGVPGGPGMRGMPGSPGGPGSDGKPGPPGNQ |
| | GESGRPGPPGPSGPRGQPGVMGFPGPKGNDGAPGKNGERGGPGGPGPQGPPGKNGET |
| | GPQGPPGPTGPGGDKGDTGPPGPQGLQGLPGTGGPPGENGKPGEPGPKGDAGAPGAP |
| | GGKGDAGAPGERGPPAIAGIGGEKAGGFAPYYG |
| 993 | DVKSGVAVGGLAGYPGPAGAPGPPGPPGASGHPGSPGAPGYQGPPGAPGQAGPSGAP |
| | GPPGAIGASGPAGKDGASGRPGRPGERGLPGPPGAKGPAGIPGAPGMKGHRGFDGRN |
| | GEKGATGAPGLKGANGLPGENGAPGPMGPRGAPGERGRPGAPGAAGARGADGARGSD |
| | GAPGPPGPPGAAGFPGSPGAKGEVGPAGAPGSNGAPGARGEPGPQGAAGAQGPPGAP |
| | GINGSPGAKGEMGPAGAPGAPGLMGARGPPGPAGANGAPGLRGAAGEPGKNGAKGEP |
| | GPRGARGEAGIPGAPGAKGEDGADGSPGEPGANGLPGAAGARGAPGFRGAAGPNGIP |
| | GAKGPAGERGAPGPAGPRGAAGEPGRDGAPGGPGMRGAPGSPGGPGADGKPGPPGAQ |
| | GESGRPGAPGPSGPRGAPGVMGFPGAKGNDGAPGANGERGGPGAPGPQGPPGANGET |
| | GPQGAPGPTGPGGAKGDTGPPGAQGLQGLPGAGGPPGENGAPGEPGPKGAAGAPGAP |
| | GAKGDAGAPGERGPPAIAGIGGEKAGGFAPYYG |
| 994 | DSYDVKSGVAVGGLAGYPGPAGPPGPPGPPGTSGHPGSPGSPGYQGPPGEPGQAGPS |
| | GPPGPPGAIGPSGPAGKDGESGRPGRPGERGLPGPPGIKGPAGIPGFPGMKGHRGFD |
| | GRNGEKGETGAPGLKGENGLPGENGAPGPMGPRGAPGERGRPGLPGAAGARGNDGAR |
| | GSDGQPGPPGPPGTAGFPGSPGAKGEVGPAGSPGSNGAPGQRGEPGPQGHAGAQGPP |
| | GPPGINGSPGGKGEMGPAGIPGAPGLMGARGPPGPAGANGAPGLRGGAGEPGKNGAK |
| | GEPGPRGERGEAGIPGVPGAKGEDGKDGSPGEPGANGLPGAAGERGAPGFRGPAGPN |
| | GIPGEKGPAGERGAPGPAGPRGAAGEPGRDGVPGGPGMRGMPGSPGGPGSDGKPGPP |
| | GSQGESGRPGPPGPSGPRGQPGVMGFPGPKGNDGAPGKNGERGGPGGPGPQGPPGKN |
| | GETGPQGPPGPTGPGGDKGDTGPPGPQGLQGLPGTGGPPGENGKPGEPGPKGDAGAP |
| | GAPGGKGDAGAPGERGPPAIAGIGGEKAGGFAPYYG |
| 995 | DVKSGVAVGGLAGYPGPAGPPGPPGPPGTSGHPGSPGSPGYQGPPGEPGQAGPSGPP |
| | GPPGAIGPSGPAGKDGESGRPGRPGERGLPGPPGIKGPAGIPGFPGMKGHRGFDGRN |
| | GEKGETGAPGLKGENGLPGENGAPGPMGPRGAPGERGRPGLPGAAGARGNDGARGSD |
| | GQPGPPGPPGAIGPSGPAGKDGESGRPGRPGERGLPGPPGIKGPAGIPGFPGMKGHR |
| | GFDGRNGEKGETGAPGLKGENGLPGENGAPGPMGPRGAPGERGRPGLPGAAGARGND |
| | GARGSDGQPGPPGPPAIAGIGGEKAGGFAPYYG |
| 996 | DVKSGVAVGGLAGYPGPAGPPGPPGPPGTSGHPGSPGSPGYQGPPGEPGQAGPSGPP |
| | GPPGAIGPSGPAGKDGESGRPGRPGERGLPGPPGIKGPAGIPGFPGMKGHRGFDGRN |
| | GEKGETGAPGLKGENGLPGENGAPGPMGPRGAPGERGRPGLPGAAGARGNDGARGSD |
| | GQPGPPGPPGAIGPSGPAGKDGESGRPGRPGERGLPGPPGIKGPAGIPGFPGMKGHR |
| | GFDGRNGEKGETGAPGLKGENGLPGENGAPGPMGPRGAPGERGRPGLPGAAGARGND |
| | GARGSDGQPGPPGPPAIAGIGGEKAGGFAPYYG |
| 997 | DVKSGVAVGGLAGYPGPAGPPGPPGPPGTSGHPGSPGSPGYQGPPGEPGQAGPSGPP |
| | GPPGAIGPSGPAGKDGESGRPGRPGERGLPGPPGIKGPAGIPGFPGMKGHRGFDGRN |
| | GEKGETGAPGLKGENGLPGENGAPGPMGPRGAPGERGRPGLPGAAGARGNDGARGSD |
| | GQPGPPGPPGAIGPSGPAGKDGESGRPGRPGERGLPGPPGIKGPAGIPGFPGMKGHR |
| | GFDGRNGEKGETGAPGLKGENGLPGENGAPGPMGPRGAPGERGRPGLPGAAGARGND |
| | GARGSDGQPGPPGPPGAIGPSGPAGKDGESGRPGRPGERGLPGPPGIKGPAGIPGFP |
| | GMKGHRGFDGRNGEKGETGAPGLKGENGLPGENGAPGPMGPRGAPGERGRPGLPGAA |
| | GARGNDGARGSDGQPGPPGPPAIAGIGGEKAGGFAPYYG |
| 998 | DVKSGVAVGGLAGYPGPAGPPGPPGPPGTSGHPGSPGSPGYQGPPGEPGQAGPSGPP |
| | GPPGAIGPSGPAGKDGESGRPGRPGERGLPGPPGIKGPAGIPGFPGMKGHRGFDGRN |
| | GEKGETGAPGLKGENGLPGENGAPGPMGPRGAPGERGRPGLPGAAGARGNDGARGSD |
| | GQPGPPGPPGTAGFPGSPGAKGEVGPAGSPGSNGAPGQRGEPGPQGHAGAQGPPGPP |
| | GINGSPGGKGEMGPAGIPGAPGLMGARGPPGPAGANGAPGLRGGAGEPGKNGAKGEP |
| | GPRGERGEAGIPGVPGAKGEDGKDGSPGEPGANGLPGAAGERGAPGFRGPAGPNGIP |
| | GEKGPAGERGAPGPAGPRGAAGEPGRDGVPGGPGMRGMPGSPGGPGSDGKPGPPGSQ |
| | GESGRPGPPGPSGPRGQPGVMGFPGPKGHRGFPGKNGERGGPGGPGPQGPPGKNGET |
| | GPQGPPGPTGPGGDKGDTGPPGPQGLQGLPGTGGPPGENGKPGEPGPKGDAGAPGAP |
| | GGKGDAGAPGERGPPAIAGIGGEKAGGFAPYYG |
| 999 | DVKSGVAVGGLAGYPGPAGPPGPPGPPGTSGHPGSPGSPGYQGPPGEPGQAGPSGPP |
| | GPPGAIGPSGPAGKDGESGRPGRPGAAGLPGPPGIKGPAGIPGFPGMKGHRGFDGRN |
| | GEKGETGAPGLKGENGLPGAAGAPGPMGPRGAPGAAGRPGLPGAAGARGNDGARGSD |
| | GQPGPPGPPGTAGFPGSPGAKGEVGPAGSPGSNGAPGQRGEPGPQGHAGAQGPPGPP |
| | GINGSPGGKGEMGPAGIPGAPGLMGARGPPGPAGANGAPGLRGGAGEPGKNGAKGEP |
| | GPRGERGEAGIPGVPGAKGEDGKDGSPGEPGANGLPGAAGERGAPGFRGPAGPNGIP |
| | GEKGPAGERGAPGPAGPRGAAGEPGRDGVPGGPGMRGMPGSPGGPGSDGKPGPPGSQ |
| | GESGRPGPPGPSGPRGQPGVMGFPGPKGNDGAPGKNGERGGPGGPGPQGPPGKNGET |
| | GPQGPPGPTGPGGDKGDTGPPGPQGLQGLPGTGGPPGENGKPGEPGPKGDAGAPGAP |
| | GGKGDAGAPGPLVLRQLLVLVEKRPAVSLHIMVNQEDVRMPFA |
| 1000 | DVKSGVAVGGLAGYPGPAGPPGPPGPPGTSGHPGSPGSPGYQGPPGEPGQAGPSGPP |
| | GPPGAIGPSGPAGKDGESGKPGRPGERGLPGPPGIKGPAGIPGFPGMKGHRGFDGKN |
| | GEKGETGAPGLKGENGLPGENGAPGPMGPKGAPGERGKPGLPGAAGAKGNDGAKGSD |
| | GQPGPPGPPGTAGFPGSPGAKGEVGPAGSPGSNGAPGQKGEPGPQGHAGAQGPPGPP |
| | GINGSPGGKGEMGPAGIPGAPGLMGAKGPPGPAGANGAPGLKGGAGEPGKNGAKGEP |
| | GPKGEKGEAGIPGVPGAKGEDGKDGSPGEPGANGLPGAAGEKGAPGFKGPAGPNGIP |
| | GEKGPAGEKGAPGPAGPKGAAGEPGKDGVPGGPGMKGMPGSPGGPGSDGKPGPPGSQ |
| | GESGKPGPPGPSGPKGQPGVMGFPGPKGNDGAPGKNGEKGGPGGPGPQGPPGKNGET |
| | GPQGPPGPTGPGGDKGDTGPPGPQGLQGLPGTGGPPGENGKPGEPGPKGDAGAPGAP |
| | GGKGDAGAPGERGPPAIAGIGGEKAGGFAPYYG |
| 1001 | DVKSGVAVGGLAGYPGPAGPPGPPGPPGTSGHPGSPGSPGYQGPPGEPGQAGPSGPP |
| | GPPGAIGPSGPAGKDGESGRPGRPGERGLPGPPGIKGPAGIPGFPGMKGHRGFDGRN |
| | GEKGETGAPGLKGENGLPGENGAPGPMGPRGAPGERGRPGLPGAAGARGNDGARGSD |
| | GQPGPPGPPGTAGFPGAVGAKGEAGPQGPRGSEGPQGVRGEPGPPGPAGAAGPAGPP |
| | GADGQPGAKGAMGAPGIAGAPGFPGARGPPGPQGAGGPPGPKGGAGEPGAPGAKGDT |
| | GAKGERGPVGVQGPPGPAGEEGKRGARGEPGPTGLPGPPGERGGPGFRGFPGADGIP |
| | GEKGPAGERGAPGPAGPRGAAGEPGRDGVPGGPGMRGMPGSPGGPGSDGKPGPPGSQ |
| | GESGRPGPPGPSGPRGQPGVMGFPGPKGNDGAPGKNGERGGPGGPGPQGPPGKNGET |
| | GPQGPPGPTGPGGDKGDTGPPGPQGLQGLPGTGGPPGENGKPGEPGPKGDAGAPGAP |
| | GGKGDAGAPGERGPPAIAGIGGEKAGGFAPYYG |
| 1002 | DVKSGVAVGGIAGYPGPAGPPGPPGPPGTSGHPGSPGSPGYQGPPGEPGQAGPSGPP |
| | GPPGALGPSGPAGKDGESGRPGRPGERGVPGPPGVKGPAGLPGFPGMKGHRGFDGRN |
| | GEKGETGAPGLKGENGLPGENGAPGPMGPRGAPGERGRPGLPGAAGARGNDGARGSD |
| | GQPGPPGPPGTAGFPGSPGAKGELGPAGSPGSNGAPGQRGEPGPQGHAGAQGPPGPP |
| | GLNGSPGGKGEMGPAGVPGAPGIMGARGPPGPAGANGAPGIRGGAGEPGKNGAKGEP |
| | GPRGERGEAGLPGLPGAKGEDGKDGSPGEPGANGVPGAAGERGAPGFRGPAGPNGLP |
| | GEKGPAGERGAPGPAGPRGAAGEPGRDGIPGGPGMRGMPGSPGGPGSDGKPGPPGSQ |
| | GESGRPGPPGPSGPRGQPGLMGFPGPKGNDGAPGKNGERGGPGGPGPQGPPGKNGET |
| | GPQGPPGPTGPGGDKGDTGPPGPQGVQGLPGTGGPPGENGKPGEPGPKGDAGAPGAP |
| | GGKGDAGAPGERGPPAIAGIGGEKAGGFAPYYG |
| 1003 | DVKSGVAVGGLAGYPGPAGPPGPPGPPGAAGHPGAPGAPGYQGPPGEPGQAGPAGPP |
| | GPPGAIGPAGPAGKDGEAGRPGRPGERGLPGPPGIKGPAGIPGFPGMKGHRGFDGRD |
| | GEKGEAGAPGLKGEDGLPGENGAPGPMGPRGAPGERGRPGLPGAAGARGDDGARGAD |
| | GQPGPPGPPGAAGFPGAPGAKGEVGPAGAPGADGAPGQRGEPGPQGHAGAQGPPGPP |
| | GIDGAPGGKGEMGPAGIPGAPGLMGARGPPGPAGADGAPGLRGGAGEPGKDGAKGEP |
| | GPRGERGEAGIPGVPGAKGEDGKDGAPGEPGADGLPGAAGERGAPGFRGPAGPDGIP |
| | GEKGPAGERGAPGPAGPRGAAGEPGRDGVPGGPGMRGMPGAPGGPGADGKPGPPGAQ |
| | GEAGRPGPPGPAGPRGQPGVMGFPGPKGDDGAPGKDGERGGPGGPGPQGPPGKDGEA |
| | GPQGPPGPAGPGGDKGDAGPPGPQGLQGLPGAGGPPGEDGKPGEPGPKGDAGAPGAP |
| | GGKGDAGAPGERGPPAIAGIGGEKAGGFAPYYG |
| 1004 | DVKSGVAVGGLAGYPGPAGPPGPPGPPGTSGHPGSPGSPGYQGPPGEPGQAGPSGPP |
| | GPPGAIGPSGPAGKDGESGRPGRPGERGLPGPPGIKGPAGIPGFPGMKGHRGFDGRN |
| | GEKGETGAPGLKGENGLPGENGAPGPMGPRGAPGERGRPGLPGAAGARGNDGARGSD |
| | GQPGPPGPPGTAGFPGSPGAKGEVGPAGSPGSNGAPGQRGEPGPQGHAGAQGPPGPP |
| | GINGSPGGKGEMGPAGIEPGRPEGEKGGGRGGAPGAPGRGAGNGEGARPPPLMGGAG |
| | GNKAGPLAAPIPGVPGAKGEDGKDGSPGEPGANGLPGAAGERGAPGFRGPAGPNGIP |
| | GEKGPAGERGAPGPAGPRGAAGEPGRDGVPGGPGMRGMPGSPGGPGSDGKPGPPGSQ |
| | GESGRPGPPGPSGPRGQPGVMGFPGPKGNDGAPGKNGERGGPGGPGPQGPPGKNGET |
| | GPQGPPGPTGPGGDKGDTGPPGPQGLQGLPGTGGPPGENGKPGEPGPKGDAGAPGAP |
| | GGKGDAGAPGERGPPAIAGIGGEKAGGFAPYYG |
| 1005 | DVKSGVAVGGLAGYPGPAGPPGPPGPPGTSGHPGSPGSPGYQGPPGEPGQAGPSGPP |
| | GPPGAIGPSGPAGKDGESGRPGRPGERGLPGPPGIKGPAGIPGFPGMKGHRGFDGRN |
| | GEKGETGAPGLKGENGLPGENGAPGPMGPRGAPGERGRPGLPGAAGARGNDGARGSD |
| | GQPGPPGPPGTAGFPGSPGAKGEVGPAGSPGSNGAPGQRGEPGPQGHAGAQGPPGPP |
| | GINGSPGGKGEMGPAGIEPGRPEGEKGGGRGGAPGAPGRGAGNGEGARPPPLMGGAG |
| | GNKAGPLAAPIPGVPGAKGEDGKDGSPGEPGANGLPGAAGERGAPGFRGPAGPNGIP |
| | GEKGPAGERGAPGPAGPRGAAGEPGRDGVPGGPGMRGMPGSPGGPGSDGKPGPPGSQ |
| | GESGRPGPPGPSGPRGQPGVMGFPGPKGNDGAPGKNGERGGPGGPGPQGPPGKNGET |
| | GPQGPPGPTGPGGDKGDTGPPGPQGLQGLPGTGGPPGENGKPGEPGPKGDAGAPGAP |
| | GGKGDAGAPGERGPPAIAGIGGEKAGGFAPYYG |
| 1006 | DVKSGVAVGGLAGYPGPAGPPGPPGPPGTSGHPGSPGSPGYQGPPGEPGQAGPSGPP |
| | GPPGAIGPSGPAGKRGESGRPGRPGERGLPGPPGIKGPAGIPGFPGMKGHRGFRGRN |
| | GEKGRTGAPGLKGENGLPGENGAPGPMGPRGAPGERGRPGLPGAAGARGNRGARGSR |
| | GQPGPPGPPGTAGFPGSPGAKGRVGPAGSPGSNGAPGQRGRPGPQGHAGAQGPPGPP |
| | GINGSPGGKGRMGPAGIPGAPGLMGARGPPGPAGANGAPGLRGGAGRPGKNGAKGRP |
| | GPRGERGRAGIPGVPGAKGRRGKRGSPGEPGANGLPGAAGERGAPGFRGPAGPNGIP |
| | GEKGPAGERGAPGPAGPRGAAGRPGRRGVPGGPGMRGMPGSPGGPGSRGKPGPPGSQ |
| | GESGRPGPPGPSGPRGQPGVMGFPGPKGNRGAPGKNGRRGGPGGPGPQGPPGKNGET |
| | GPQGPPGPTGPGGRKGRTGPPGPQGLQGLPGTGGPPGENGKPGRPGPKGDAGAPGAP |
| | GGKGRAGAPGERGPPAIAGIGGEKAGGFAPYYG |
| 1007 | DVKSGVAVGGMGGYPGPAGPPGPPGPPGVSGHPGAPGAPGYQGPPGEPGQAGPAGPP |
| | GPPGAMGPAGPAGKDGESGRPGRPGERGFPGPPGIKGPAGMPGFPGMKGHRGFDGRN |
| | GEKGDTGAPGLKGENGLPGENGAPGPMGPRGAPGERGRPGLPGAAGARGNDGARGSD |
| | GQPGPPGPPGTAGFPGSPGAKGEVGPAGAPGPNGAPGQRGEPGLQGQAGAPGPPGPP |
| | GINGSPGGKGEMGPAGIPGAPGLIGARGPPGPPGANGVPGQRGAAGEPGKNGAKGDP |
| | GARGERGEAGIPGIAGPKGEDGKDGSPGEPGANGLPGAPGERGPPGFRGAPGANGIP |
| | GEKGPPGERGGPGPAGPRGVAGEPGRDGLPGGPGLRGIPGSPGGPGSDGKPGPPGSQ |
| | GESGRPGPPAHLVQGVSLVSWVSPVQRVMTEHRVKMVNVVAQVVQDCPVQQEKTVRQ |
| | VLKDLQDLPVLQEIREMQDRQDLLDCKVCLVQEALPEKMVSLESQDQKAMSEPQVFP |
| | EVRETPVLRVSVVLRQLLVLVEKRPAVSLHIMVNQEDVRMPFA |
| 1008 | DVKSGVAVGGLAGYPGPAGPPGPPGPPGTSGHPGSPGSPGYQGPPGEPGQAGPSGPP |
| | GPPGAIGPSGPAGKDGESGRPGRPGERGLPGPPGIKGPAGIPGFPGMKGHRGFDGRN |
| | GEKGETGAPGLKGENGLPGENGAPGPMGPRGAPGERGRPGLPGAAGARGNDGARGSD |
| | GQPGPPGPPGTAGFPGSPGAKGEVGPAGSPGSNGAPGQRGEPGPQGHAGAQGPPGPP |
| | GINGSPGGKGEMGPAGIPGAPGLMGARGPPGPAGANGAPGLRGGAGEPGKNGAKGEP |
| | GPRGERGEAGIPGVPGAKGEDGKDGSPGEPGANGLPGAAGERGAPGFRGPAGPNGVA |
| | GPKGPAGERGAPGPAGPKGAAGEAGRPGEAGLPGAKGMPGSPGGPGPDGKPGPPGPA |
| | GQDGRPGPPGPPGARGQAGVMGFPGPKGAAGEPGKAGERGVPGPPGAVGPAGKDGEA |
| | GAQGPPGPAGPAGERGEQGPAGPQGFQGLPGPAGPPGEAGKPGEQGVPGDLGAPGAP |
| | GARGERGAPGERGPPAIAGIGGEKAGGFAPYYG |
| 1009 | DSYDVKSGVAVGGLAGYPGPAGPPGPPGPPGTSGHPGSPGSPGYQGPPGEPGQAGPS |
| | GPPGPPGAIGPSGPAGKDGESGRPGRPGERGLPGPPGIKGPAGIPGFPGMKGHRGFD |
| | GRNGEKGETGAPGLKGENGLPGENGAPGPMGPRGAPGERGRPGLPGAAGARGNDGAR |
| | GSDGQPGPPGPPGTAGFPGSPGAKGEVGPAGSPGSNGAPGQRGEPGPQGHAGAQGPP |
| | GPPGINGSPGGKGEMGPAGIPGAPGLMGARGPPGPAGANGAPGLRGGAGEPGKNGAK |
| | GEPGPRGERGEAGIPGVPGAKGEDGKDGSPGEPGANGLPGAAGERGAPGFRGPAGPN |
| | GIPGEKGPAGERGAPGPAGPRGAAGEPGRDGVPGGPGMRGMPGSPGGPGSDGKPGPP |
| | GSQGESGRPGPPGPSGPRGQPGVMGFPGPKGNDGAPGKNGERGGPGGPGPQGPPGKN |
| | GETGPQGPPGPTGPGGDKGDTGPPGPQGLQGLPGTGGPPGENGKPGEPGPKGDAGAP |
| | GAPGGKGDAGAPGERGPP |
| 1010 | DVKSGVAVGKTTKSGLAGYPGPAGPPGPPGPPGTSGHPGSPGSPGYQGPPGEPGQAG |
| | PSGPPGPPGAIGPSGPAGKDGESGRPGRPGERGLPGPPGIKGPAGIPGFPGMKGHRG |
| | FDGRNGEKGETGAPGLKGENGLPGENGAPGPMGPRGAPGERGRPGLPGAAGARGNDG |
| | ARGSDGQPGPPGPPGTAGFPGSPGAKGEVGPAGSPGSNGAPGQRGEPGPQGHAGAQG |
| | PPGPPGINGSPGGKGEMGPAGIPGAPGLMGARGPPGPAGANGAPGLRGGAGEPGKNG |
| | AKGEPGPRGERGEAGIPGVPGAKGEDGKDGSPGEPGANGLPGAAGERGAPGFRGPAG |
| | PNGIPGEKGPAGERGAPGPAGPRGAAGEPGRDGVPGGPGMRGMPGSPGGPGSDGKPG |
| | PPGSQGESGRPGPPGPSGPRGQPGVMGFPGPKGNDGAPGKNGERGGPGGPGPQGPPG |
| | KNGETGPQGPPGPTGPGGDKGDTGPPGPQGLQGLPGTGGPPGENGKPGEPGPKGDAG |
| | APGAPGGKGDAGAPGERGPPKTTKSAIAGIGGEKAGGFAPYYG |
| 1011 | DVKSGVAVGKTTKSGLAGYPGPAGPPGPPGPPGTSGHPGSPGSPGYQGPPGEPGQAG |
| | PSGPPGPPGAIGPSGPAGKDGESGRPGRPGERGLPGPPGIKGPAGIPGFPGMKGHRG |
| | FDGRNGEKGETGAPGLKGENGLPGENGAPGPMGPRGAPGERGRPGLPGAAGARGNDG |
| | ARGSDGQPGPPGPPGTAGFPGSPGAKGEVGPAGSPGSNGAPGQRGEPGPQGHAGAQG |
| | PPGPPGINGSPGGKGEMGPAGIPGAPGLMGARGPPGPAGANGAPGLRGGAGEPGKNG |
| | AKGEPGPRGERGEAGIPGVPGAKGEDGKDGSPGEPGANGLPGAAGERGAPGFRGPAG |
| | PNGIPGEKGPAGERGAPGPAGPRGAAGEPGRDGVPGGPGMRGMPGSPGGPGSDGKPG |
| | PPGSQGESGRPGPPGPSGPRGQPGVMGFPGPKGNDGAPGKNGERGGPGGPGPQGPPG |
| | KNGETGPQGPPGPTGPGGDKGDTGPPGPQGLQGLPGTGGPPGENGKPGEPGPKGDAG |
| | APGAPGGKGDAGAPGERGPPKTTKSAIAGIGGEKAGGFAPYYG |
| 1012 | DVKSGVAVGKTTKSGLAGYPGPAGPPGPPGPPGTSGHPGSPGSPGYQGPPGEPGQAG |
| | PSGPPGPPGAIGPSGPAGKDGESGRPGRPGAAGLPGPPGIKGPAGIPGFPGMKGHRG |
| | FDGRNGEKGETGAPGLKGENGLPGAAGAPGPMGPRGAPGAAGRPGLPGAAGARGNDG |
| | ARGSDGQPGPPGPPGTAGFPGSPGAKGEVGPAGSPGSNGAPGQRGEPGPQGHAGAQG |
| | PPGPPGINGSPGGKGEMGPAGIPGAPGLMGARGPPGPAGANGAPGLRGGAGEPGKNG |
| | AKGEPGPRGERGEAGIPGVPGAKGEDGKDGSPGEPGANGLPGAAGERGAPGFRGPAG |
| | PNGIPGEKGPAGERGAPGPAGPRGAAGEPGRDGVPGGPGMRGMPGSPGGPGSDGKPG |
| | PPGSQGESGRPGPPGPSGPRGQPGVMGFPGPKGNDGAPGKNGERGGPGGPGPQGPPG |
| | KNGETGPQGPPGPTGPGGDKGDTGPPGPQGLQGLPGTGGPPGENGKPGEPGPKGDAG |
| | APGAPGGKGDAGAPGAAGPPKTTKSAIAGIGGEKAGGFAPYYG |
| 1013 | DVKSGVAVGGLAGYPGPAGPPGPPGPPGTSGHPGSPGSPGYQGPPGEPGQAGPSGPP |
| | GPPGAIGPSGPAGKDGESGRPGRPGERGLPGPPGIKGPAGIPGFPGMKGHRGFDGRN |
| | GEKGETGAPGLKGENGLPGENGAPGPMGPRGAPGERGRPGLPGAAGARGNDGARGSD |
| | GQPGPPGPPGTAGFPGSPGAKGEVGPAGSPGSNGAPGQRGEPGPQGHAGAQGPPGPP |
| | GINGSPGGKGEMGPAGIPGAPGLMGARGPPGPAGANGAPGLRGGAGEPGKNGAKGEP |
| | GPRGERGEAGIPGVPGAKGEEGKRGARGEAGSAGPPGPPGLRGAPGFRGLPGADGRA |
| | GVMGPPGERGAPGPAGVRGAAGDAGRPGEPGLMGPRGLPGSPGGPGPAGKEGPVGLP |
| | GIDGRPGPIGPAGARGEPGVMGFPGPKGNDGDPGKNGDKGHAGLAGARGAPGPDGET |
| | GPQGPPGPTGPGGDKGDTGPPGPQGLQGLPGTGGPPGENGKPGEPGPKGDAGAPGAP |
| | GGKGDAGAPGERGPPAIAGIGGEKAGGFAPYYG |
| 1014 | DVKSGVAVGGMGGYPGPAGPPGPPGPPGVSGHPGAPGAPGYQGPPGEPGQAGPAGPP |
| | GPPGAMGPAGPAGKDGESGRPGRPGERGFPGPPGIKGPAGMPGFPGMKGHRGFDGRN |
| | GEKGDTGAPGLKGENGLPGENGAPGPMGPRGAPGERGRPGLPGAAGARGNDGARGSD |
| | GQPGPPGPPGTAGFPGSPGAKGEVGPAGAPGPNGAPGQRGEPGLQGQAGAPGPPGPP |
| | GINGSPGGKGEMGPAGIPGAPGLIGARGPPGPPGANGVPGQRGAAGEPGKNGAKGDP |
| | GARGERGEAGIPGIAGPKGEDGKDGSPGEPGANGLPGAPGERGPPGFRGAPGANGIP |
| | GEKGPPGERGGPGPAGPRGVAGEPGRDGLPGGPGLRGIPGSPGGPGSDGKPGPPGSQ |
| | GESGRPGPPGSPGPRGQPGVMGFPGPKGNDGAPGKNGERGGPGGPGLPGPAGKNGET |
| | GPQGPPGPTGPAGDKGDAGPPGPPGLQGLPGTGGPPGENGKPGEPGPKGDVGAPGIP |
| | GGKGDAGAPGERGPPAIAGIGGEKAGGFAPYYG |
| 1015 | DVKSGVAVGGLAGYPGPAGPPGPPGPPGTSGHPGSPGSPGYQGPPGEPGQAGPAGPP |
| | GPIGNVGPSGPAGKDGESGRPGRPGERGLPGPPGIKGPAGIPGFPGMKGHRGFDGRN |
| | GEKGETGAPGLKGENGLPGENGAPGPMGPRGAPGERGRPGLPGAAGARGNDGARGSD |
| | GQPGPPGPPGTAGFPGSPGAKGEVGPAGSPGSNGAPGQRGEPGPQGHAGAQGPPGPP |
| | GINGSPGGKGEMGPAGIPGAPGLMGARGPPGPAGANGAPGLRGGAGEPGKNGAKGEP |
| | GPRGERGEAGIPGVPGAKGEDGKDGSPGEPGANGLPGAAGERGAPGFRGPAGPNGIP |
| | GEKGPAGERGAPGPAGPRGAAGEPGRDGVPGGPGMRGMPGSPGGPGSDGKPGPPGSQ |
| | GESGRPGPPGPSGPRGQPGVMGFPGPKGNDGAPGKNGERGGPGGPGPQGPPGKNGET |
| | GPQGPPGPTGPGGDKGDTGPPGPQGLQGLPGTGGPPGENGKPGEPGPKGDAGAPGAP |
| | GGKGDAGAPGERGPPAIAGIGGEKAGGFAPYYG |

[0074] In some embodiments, the collagen fragment sequence variant described herein can have an amino acid sequence that is encoded by a nucleic acid sequence set forth below in Table 5.

TABLE 5

| SEQ ID NO. | Sequences |
|---|---|
| 1016 | GACGTCAAATCTGGTGTTGCTGTCGGAGGACTTGCAGGATATCCAGGACC |
| | TGCCGGACCACCTGGACCACCAGGCCCACCAGGCACCTCAGGCCATCCA |
| | GGCTCCCCAGGATCACCTGGATATCAGGGACCACCAGGCGAGCCAGGAC |
| | AGGCCGGCCCAAGTGGACCACCTGGACCACCAGGCGCCATAGGCCCTTC |
| | AGGCCCAGCCGGAAAAGACGGAGAGAGTGGCCGTCCAGGAAGGCCAGG |
| | AGAAAGGGGACTGCCAGGACCACCTGGCATCAAAGGCCCTGCCGGAATA |
| | CCAGGATTCCCAGGCATGAAAGGACATCGTGGATTCGACGGAAGGAATG |
| | GAGAGAAAGGCGAGACCGGCGCCCCAGGACTCAAAGGCGAGAATGGCC |
| | TGCCTGGAGAGAATGGAGCCCCAGGACCAATGGGCCCTCGTGGAGCCCC |
| | AGGCGAAAGGGGACGTCCTGGACTGCCAGGAGCCGCAGGCGCCCGTGGC |
| | AATGACGGCGCCAGGGGAAGTGACGGCCAGCCTGGACCACCAGGCCCAC |
| | CAGGAACAGCTGGATTCCCAGGATCCCCAGGCGCCAAAGGCGAGGTAGG |
| | ACCAGCAGGATCACCAGGCAGTAATGGCGCTCCAGGACAGCGTGGAGAG |
| | CCAGGACCACAAGGACATGCCGGCGCCCAGGGCCCACCAGGACCACCAG |
| | GAATCAATGGCAGTCCAGGCGGCAAAGGAGAGATGGGCCCAGCCGGAAT |
| | CCCAGGAGCCCCAGGATTGATGGGAGCTCGTGGCCCACCTGGACCTGCT |
| | GGCGCCAATGGCGCCCCAGGATTGAGGGGCGGCGCAGGCGAACCAGGCA |
| | AAAATGGCGCTAAAGGAGAACCAGGACCTCGAGGCGAGCGTGGCGAAG |
| | CCGGCATCCCTGGCGTACCTGGAGCCAAAGGAGAGGACGGAAAAGACGG |
| | AAGTCCAGGAGAGCCAGGCGCAAATGGACTGCCTGGAGCCGCAGGAGA |
| | GCGTGGCGCTCCAGGATTCAGGGGACCAGCCGGACCTAATGGAATCCCT |
| | GGAGAGAAAGGCCCAGCCGGAGAACGAGGCGCCCCTGGACCAGCAGGA |
| | CCACGTGGAGCCGCCGGAGAGCCAGGACGTGACGGAGTCCCAGGAGGCC |
| | CTGGAATGCGTGGAATGCCAGGAAGTCCTGGAGGACCTGGAAGTGACGG |
| | AAAACCTGGACCACCAGGAAGTCAGGGAGAGAGTGGCAGGCCTGGCCCA |
| | CCAGGACCTTCAGGCCCAAGGGGCCAACCAGGCGTCATGGGATTCCCAG |
| | GCCCAAAAGGAAATGACGGCGCCCCAGGCAAAAATGGAGAGAGGGGCG |
| | GACCAGGAGGACCAGGACCACAAGGCCCACCAGGAAAAAATGGCGAGA |
| | CAGGACCACAAGGACCACCTGGACCAACAGGACCAGGCGGCGACAAAG |
| | GAGACACCGGACCACCAGGCCCTCAGGGACTCCAGGGACTGCCAGGCAC |
| | CGGCGGCCCACCTGGAGAGAATGGAAAACCAGGAGAGCCTGGCCCTAAA |
| | GGCGACGCTGGCGCACCAGGAGCCCCTGGAGGAAAAGGCGACGCCGGC |
| | GCTCCAGGCGAGCGAGGACCACCAGCAATTGCTGGTATTGGTGGAGAAA |
| | AGGCCGGCGGTTTCGCTCCATATTATGGT |
| 1017 | GACGTCAAATCTGGTGTTGCTGTTGGAGGTTTAGCAGGCTACCCTGGTCC |
| | CGCAGGGGCTCCAGGTCCGCCGGGTCCGCCCGGAGCTTCAGGTCATCCCG |
| | GAAGCCCTGGTGCTCCAGGTTATCAGGGACCGCCCGGAGCTCCTGGACA |
| | AGCTGGTCCCTCCGGAGCTCCTGGTCCACCAGGTGCTATTGGAGCTAGTG |
| | GTCCTGCCGGAAAAGACGGTGCTTCCGGTAGACCTGGTAGACCCGGCGA |
| | AAGGGGTTTACCAGGTCCTCCCGGAGCTAAGGGTCCAGCCGGTATACCC |
| | GGTGCTCCTGGGATGAAGGGTCACAGAGGATTTGATGGTAGAAACGGAG |
| | AGAAAGGCGCTACCGGTGCTCCCGGACTGAAGGGTGCTAACGGTCTTCCT |
| | GGTGAGAACGGCGCTCCTGGACCTATGGGTCCACGTGGTGCTCCAGGAG |
| | AAAGAGGCAGACCAGGAGCTCCTGGTGCAGCTGGTGCTAGAGGTGCTGA |
| | TGGTGCCCGTGGTTCCGATGGAGCTCCCGGGCCACCCGGCCCTCCAGGTG |
| | CTGCTGGATTTCCTGGAAGCCCTGGTGCTAAGGGGGAGGTTGGTCCGGCT |
| | GGTGCTCCCGGAAGTAACGGTGCCCCAGGTGCTAGAGGCGAACCAGGCC |
| | CTCAGGGTGCTGCAGGAGCACAGGGACCGCCTGGTGCTCCTGGTATTAAT |
| | GGTTCGCCTGGAGCTAAAGGTGAAATGGGGCCCGCAGGAGCTCCCGGTG |
| | CGCCTGGTCTTATGGGTGCCAGGGGTCCTCCAGGCCCGGCCGGTGCAAAT |
| | GGTGCTCCCGGATTACGAGGAGCTGCTGGTGAACCTGGTAAAAACGGTG |
| | CCAAAGGAGAACCAGGTCCTCGTGGAGCTCGTGGTGAAGCTGGCATTCC |
| | CGGTGCTCCTGGTGCAAAAGGTGAGGACGGTGCTGACGGTTCCCCTGGTG |
| | AGCCAGGTGCGAACGGACTGCCAGGTGCAGCCGGAGCTCGAGGAGCTCC |
| | AGGATTCAGGGGAGCTGCCGGTCCTAACGGCATTCCTGGTGCTAAAGGG |
| | CCCGCCGGTGAAAGGGGAGCTCCCGGTCCAGCAGGCCCTCGTGGAGCAG |
| | CTGGTGAGCCTGGACGTGACGGTGCTCCAGGAGGGCCAGGTATGAGGGG |
| | TGCTCCCGGGTCCCCTGGCGGTCCTGGAGCTGATGGAAAACCAGGGCCA |
| | CCAGGTGCTCAGGGTGAAAGCGGACGTCCAGGCGCTCCCGGCCCTTCAG |
| | GTCCAAGGGGTGCTCCTGGTGTCATGGGTTTCCCCGGTGCTAAGGGTAAT |
| | GACGGAGCACCGGGTGCTAATGGTGAACGTGGTGGCCCAGGTGCTCCAG |
| | GACCCCAAGGTCCACCAGGAGCTAACGGTGAGACAGGTCCTCAAGGAGC |
| | TCCAGGACCTACCGGTCCTGGAGGAGCTAAGGGAGATACGGGACCGCCA |
| | GGAGCTCAAGGATTGCAAGGTTTGCCTGGTGCTGGAGGCCCTCCCGGAG |
| | AAAATGGTGCTCCTGGAGAGCCAGGACCAAAAGGCGCTGCTGGAGCCCC |
| | AGGTGCACCCGGAGCTAAGGGAGACGCCGGTGCTCCGGGTGAGCGTGGT |
| | CCTCCGGCAATTGCTGGTATTGGTGGAGAAAAGGCCGGCGGTTTCGCTCC |
| | ATATTATGGT |
| 1018 | GACGTCAAATCTGGTGTTGCTGTTGGAGGTTTAGCAGGCTACCCTGGTCC |
| | CGCAGGGCCCCCAGGTCCGCCGGGTCCGCCCGGAACATCAGGTCATCCC |
| | GGAAGCCCTGGTTCACCAGGTTATCAGGGACCGCCCGGAGAGCCTGGAC |
| | AAGCTGGTCCCTCCGGACCCCCTGGTCCACCAGGTGCTATTGGACCAAGT |
| | GGTCCTGCCGGAAAAGACGGTGAATCCGGTAGACCTGGTAGACCCGGCG |
| | AAAGGGGTTTACCAGGTCCTCCCGGAATTAAGGGTCCAGCCGGTATACCC |
| | GGTTTTCCTGGGATGAAGGGTCACAGAGGATTTGATGGTAGAAACGGAG |
| | AGAAAGGCGAAACCGGTGCTCCCGGACTGAAGGGTGAAAACGGTCTTCC |
| | TGGTGAGAACGGCGCTCCTGGACCTATGGGTCCACGTGGTGCTCCAGGA |
| | GAAAGAGGCAGACCAGGATTGCCTGGTGCAGCTGGTGCTAGAGGTAACG |
| | ATGGTGCCCGTGGTTCCGATGGACAACCCGGGCCACCCGGCCCTCCAGGT |
| | ACCGCTGGATTTCCTGGAAGCCCTGGTGCTAAGGGGGAGGTTGGTCCGGC |
| | TGGTAGTCCCGGAAGTAACGGTGCCCCAGGTCAAAGAGGCGAACCAGGC |
| | CCTCAGGGTCACGCAGGAGCACAGGGACCGCCTGGTCCTCCTGGTATTAA |
| | TGGTTCGCCTGGAGGAAAAGGTGAAATGGGGCCCGCAGGAATCCCCGGT |
| | GCGCCTGGTCTTATGGGTGCCAGGGGTCCTCCAGGCCCGGCCGGTGCAAA |
| | TGGTGCTCCCGGATTACGAGGAGGAGCTGGTGAACCTGGTAAAAACGGT |
| | GCCAAAGGAGAACCAGGTCCTCGTGGAGAGCGTGGTGAAGCTGGCATTC |
| | CCGGTGTGCCTGGTGCAAAAGGTGAGGACGGTAAGGACGGTTCCCCTGG |
| | TGAGCCAGGTGCGAACGGACTGCCAGGTGCAGCCGGAGAGCGAGGAGCT |
| | CCAGGATTCAGGGGACCAGCCGGTCCTAACGGCATTCCTGGTGAAAAAG |
| | GGCCCGCCGGTGAAAGGGGAGCTCCCGGTCCAGCAGGCCCTCGTGGAGC |
| | AGCTGGTGAGCCTGGACGTGACGGTGAACCAGGACTGATGGGTCCTAGG |
| | GGTCTGCCCGGGTCCCCTGGCGGTCCTGGACCTGCAGGAAAAGAAGGGC |
| | CAGTGGGTCTGCCTGGTATTGACGGACGTCCAGGCCCAATTGGCCCTGCA |
| | GGTGCAAGGGGTGAACCTGGTGTCATGGGTTTCCCCGGTCCAAAGGGTA |
| | ATGACGGAGACCCGGGTAAAAATGGTGACAAGGGTCACGCAGGTCTGGC |
| | AGGAGCAAGGGGTGCACCAGGACCTGACGGTGAGACAGGTGCACAAGG |
| | ACCTCCAGGACCTCAAGGTGTCCAAGGAGGAAAGGGAGAACAAGGACC |
| | GGCAGGACCTCCTGGATTTCAAGGTTTGCCTGGTACAGGAGGCCCTGCAG |
| | GAGAAGTCGGTAAGCCTGGAGAGCAAGGACTGCACGGCGAGTTTGGACT |
| | GCCAGGTCCCGCAGGACCTCGTGGAGAGCGTGGTGCTCCGGGTGAGCGT |
| | GGTCCTCCGGCAATTGCTGGTATTGGTGGAGAAAAGGCCGGCGGTTTCGC |
| | TCCATATTATGGT |
| 1019 | GACGTCAAATCTGGTGTTGCTGTTGGAGGTTTAGCAGGCTACCCTGGTCC |
| | CGCAGGGCCCCCAGGTCCGCCGGGTCCGCCCGGAACATCAGGTCATCCC |
| | GGAAGCCCTGGTTCACCAGGTTATCAGGGACCGCCCGGAGAGCCTGGAC |
| | AAGCTGGTCCCTCCGGACCCCCTGGTCCACCAGGTGCTATTGGACCAAGT |
| | GGTCCTGCCGGAAAAAGAGGTGAATCCGGTAGACCTGGTAGACCCGGCG |
| | AAAGGGGTTTACCAGGTCCTCCCGGAATTAAGGGTCCAGCCGGTATACCC |
| | GGTTTTCCTGGGATGAAGGGTCACAGAGGATTTAGAGGTAGAAACGGAG |
| | AGAAAGGCGAAACCGGTGCTCCCGGACTGAAGGGTGAAAACGGTCTTCC |
| | TGGTGAGAACGGCGCTCCTGGACCTATGGGTCCACGTGGTGCTCCAGGA |
| | GAAAGAGGCAGACCAGGATTGCCTGGTGCAGCTGGTGCTAGAGGTAACA |
| | GAGGTGCCCGTGGTTCCGATGGACAACCCGGGCCACCCGGCCCTCCAGG |
| | TACCGCTGGATTTCCTGGAAGCCCTGGTGCTAAGGGGAGAGTTGGTCCGG |
| | CTGGTAGTCCCGGAAGTAACGGTGCCCCAGGTCAAAGAGGCGAACCAGG |
| | CCCTCAGGGTCACGCAGGAGCACAGGGACCGCCTGGTCCTCCTGGTATTA |
| | ATGGTTCGCCTGGAGGAAAAGGTGAAATGGGGCCCGCAGGAATCCCCGG |
| | TGCGCCTGGTCTTATGGGTGCCAGGGGTCCTCCAGGCCCGGCCGGTGCAA |
| | ATGGTGCTCCCGGATTACGAGGAGGAGCTGGTAGACCTGGTAAAAACGG |
| | TGCCAAAGGAGAACCAGGTCCTCGTGGAGAGCGTGGTAGAGCTGGCATT |
| | CCCGGTGTGCCTGGTGCAAAAGGTGAGCGTGGTAAGGACGGTTCCCCTG |
| | GTGAGCCAGGTGCGAACGGACTGCCAGGTGCAGCCGGAGAGCGAGGAG |
| | CTCCAGGATTCAGGGGACCAGCCGGTCCTAACGGCATTCCTGGTGAAAA |
| | AGGGCCCGCCGGTGAAAGGGGAGCTCCCGGTCCAGCAGGCCCTCGTGGA |
| | GCAGCTGGTGAGCCTGGACGTAGAGGTGTCCCAGGAGGGCCAGGTATGA |
| | GGGGTATGCCCGGGTCCCCTGGCGGTCCTGGATCGAGAGGAAAACCAGG |
| | GCCACCAGGTTCGCAGGGTGAAAGCGGACGTCCAGGCCCACCCGGCCCT |
| | TCAGGTCCAAGGGGTCAGCCTGGTGTCATGGGTTTCCCCGGTCCAAAGGG |
| | TAATGACGGAGCACCGGGTAAAAATGGTGAACGTGGTGGCCCAGGTGGT |
| | CCAGGACCCCAAGGTCCACCAGGAAAAAACGGTGAGACAGGTCCTCAAG |
| | GACCTCCAGGACCTACCGGTCCTGGAGGAAGAAAGGGAGATACGGGACC |
| | GCCAGGACCTCAAGGATTGCAAGGTTTGCCTGGTACAGGAGGCCCTCCC |
| | GGAGAAAATGGTAAGCCTGGAAGACCAGGACCAAAAGGCGATGCTGGA |
| | GCCCCAGGTGCACCCGGAGGTAAGGGACGTGCCGGTGCTCCGGGTGAGC |
| | GTGGTCCTCCGGCAATTGCTGGTATTGGTGGAGAAAAGGCCGGCGGTTTC |
| | GCTCCATATTATGGT |
| 1020 | GACGTCAAATCTGGTGTTGCTGTTGGAGGTTTAGCAGGCTACCCTGGTCC |
| | CGCAGGGCCCCCAGGTCCGCCGGGTCCGCCCGGAGCATCAGGTCATCCC |
| | GGAAGCCCTGGTTCACCAGGTTATCAGGGACCGCCCGGAGAGCCTGGAC |
| | AAGCTGGTCCCGCAGGACCCCCTGGTCCACCAGGTGCTATTGGACCAAGT |
| | GGTCCTGCCGGAAAAGACGGTGAATCCGGTAGACCTGGTAGACCCGGCG |
| | AAAGGGGTTTACCAGGTCCTCCCGGAATTAAGGGTCCAGCCGGTATACCC |
| | GGTTTTCCTGGGATGAAGGGTCACAGAGGATTTGATGGTAGAAACGGAG |
| | AGAAAGGCGAAGCAGGTGCTCCCGGACTGAAGGGTGAAAACGGTCTTCC |
| | TGGTGAGAACGGCGCTCCTGGACCTATGGGTCCACGTGGTGCTCCAGGA |
| | GAAAGAGGCAGACCAGGATTGCCTGGTGCAGCTGGTGCTAGAGGTAACG |
| | ATGGTGCCCGTGGTTCCGATGGACAACCCGGGCCACCCGGCCCTCCAGGT |
| | GCAGCTGGATTTCCTGGAGCACCTGGTGCTAAGGGGGAGGTTGGTCCGG |
| | CTGGTAGTCCCGGAAGTAACGGTGCCCCAGGTCAAAGAGGCGAACCAGG |
| | CCCTCAGGGTCACGCAGGAGCACAGGGACCGCCTGGTCCTCCTGGTATTA |
| | ATGGTTCGCCTGGAGGAAAAGGTGAAATGGGGCCCGCAGGAATCCCCGG |
| | TGCGCCTGGTCTTATGGGTGCCAGGGGTCCTCCAGGCCCGGCCGGTGCAA |
| | ATGGTGCTCCCGGATTACGAGGAGGAGCTGGTGAACCTGGTAAAAACGG |
| | TGCCAAAGGAGAACCAGGTCCTCGTGGAGAGCGTGGTGAAGCTGGCATT |
| | CCCGGTGTGCCTGGTGCAAAAGGTGAGGACGGTAAGGACGGTTCCCCTG |
| | GTGAGCCAGGTGCGAACGGACTGCCAGGTGCAGCCGGAGAGCGAGGAG |
| | CTCCAGGATTCAGGGGACCAGCCGGTCCTAACGGCATTCCTGGTGAAAA |
| | AGGGCCCGCCGGTGAAAGGGGAGCTCCCGGTCCAGCAGGCCCTCGTGGA |
| | GCAGCTGGTGAGCCTGGACGTGACGGTGTCCCAGGAGGGCCAGGTATGA |
| | GGGGTATGCCCGGGTCCCCTGGCGGTCCTGGATCGGATGGAAAACCAGG |
| | GCCACCAGGTGCACAGGGTGAAAGCGGACGTCCAGGCCCACCCGGCCCT |
| | TCAGGTCCAAGGGGTCAGCCTGGTGTCATGGGTTTCCCCGGTCCAAAGGG |
| | TAATGACGGAGCACCGGGTAAAAATGGTGAACGTGGTGGCCCAGGTGGT |
| | CCAGGACCCCAAGGTCCACCAGGAAAAAACGGTGAGACAGGTCCTCAAG |
| | GACCTCCAGGACCTACCGGTCCTGGAGGAGATAAGGGAGATACGGGACC |
| | GCCAGGACCTCAAGGATTGCAAGGTTTGCCTGGTACAGGAGGCCCTCCC |
| | GGAGAAAATGGTAAGCCTGGAGAGCCAGGACCAAAAGGCGATGCTGGA |
| | GCCCCAGGTGCACCCGGAGGTAAGGGAGACGCCGGTGCTCCGGGTGAGC |
| | GTGGTCCTCCGGCAATTGCTGGTATTGGTGGAGAAAAGGCCGGCGGTTTC |
| | GCTCCATATTATGGT |
| 1021 | GACGTCAAATCTGGTGTTGCTGTTGGAGGTTTAGCAGGCTACCCTGGTCC |
| | CGCAGGGCCCCCAGGTCCGCCGGGTCCGCCCGGAAACTCAGGTCATCCC |
| | GGAAGCCCTGGTTCACCAGGTTATCAGGGACCGCCCGGAGAGCCTGGAC |
| | AAGCTGGTCCCAACGGACCCCCTGGTCCACCAGGTGCTATTGGACCAAGT |
| | GGTCCTGCCGGAAAAGACGGTGAATCCGGTAGACCTGGTAGACCCGGCG |
| | AAAGGGGTTTACCAGGTCCTCCCGGAATTAAGGGTCCAGCCGGTATACCC |
| | GGTTTTCCTGGGATGAAGGGTCACAGAGGATTTGATGGTAGAAACGGAG |
| | AGAAAGGCGAAAACGGTGCTCCCGGACTGAAGGGTGAAAACGGTCTTCC |
| | TGGTGAGAACGGCGCTCCTGGACCTATGGGTCCACGTGGTGCTCCAGGA |
| | GAAAGAGGCAGACCAGGATTGCCTGGTGCAGCTGGTGCTAGAGGTAACG |
| | ATGGTGCCCGTGGTTCCGATGGACAACCCGGGCCACCCGGCCCTCCAGGT |
| | AACGCTGGATTTCCTGGAAACCCTGGTGCTAAGGGGGAGGTTGGTCCGG |
| | CTGGTAGTCCCGGAAGTAACGGTGCCCCAGGTCAAAGAGGCGAACCAGG |
| | CCCTCAGGGTCACGCAGGAGCACAGGGACCGCCTGGTCCTCCTGGTATTA |
| | ATGGTTCGCCTGGAGGAAAAGGTGAAATGGGGCCCGCAGGAATCCCCGG |
| | TGCGCCTGGTCTTATGGGTGCCAGGGGTCCTCCAGGCCCGGCCGGTGCAA |
| | ATGGTGCTCCCGGATTACGAGGAGGAGCTGGTGAACCTGGTAAAAACGG |
| | TGCCAAAGGAGAACCAGGTCCTCGTGGAGAGCGTGGTGAAGCTGGCATT |
| | CCCGGTGTGCCTGGTGCAAAAGGTGAGGACGGTAAGGACGGTTCCCCTG |
| | GTGAGCCAGGTGCGAACGGACTGCCAGGTGCAGCCGGAGAGCGAGGAG |
| | CTCCAGGATTCAGGGGACCAGCCGGTCCTAACGGCATTCCTGGTGAAAA |
| | AGGGCCCGCCGGTGAAAGGGGAGCTCCCGGTCCAGCAGGCCCTCGTGGA |
| | GCAGCTGGTGAGCCTGGACGTGACGGTGTCCCAGGAGGGCCAGGTATGA |
| | GGGGTATGCCCGGGTCCCCTGGCGGTCCTGGATCGGATGGAAAACCAGG |
| | GCCACCAGGTAACCAGGGTGAAAGCGGACGTCCAGGCCCACCCGGCCCT |
| | TCAGGTCCAAGGGGTCAGCCTGGTGTCATGGGTTTCCCCGGTCCAAAGGG |
| | TAATGACGGAGCACCGGGTAAAAATGGTGAACGTGGTGGCCCAGGTGGT |
| | CCAGGACCCCAAGGTCCACCAGGAAAAAACGGTGAGACAGGTCCTCAAG |
| | GACCTCCAGGACCTACCGGTCCTGGAGGAGATAAGGGAGATACGGGACC |
| | GCCAGGACCTCAAGGATTGCAAGGTTTGCCTGGTACAGGAGGCCCTCCC |
| | GGAGAAAATGGTAAGCCTGGAGAGCCAGGACCAAAAGGCGATGCTGGA |
| | GCCCCAGGTGCACCCGGAGGTAAGGGAGACGCCGGTGCTCCGGGTGAGC |
| | GTGGTCCTCCGGCAATTGCTGGTATTGGTGGAGAAAAGGCCGGCGGTTTC |
| | GCTCCATATTATGGT |
| 1022 | GACGTCAAATCTGGTGTTGCTGTTGGAGGTTTAGCAGGCTACCCTGGTCC |
| | CGCAGGGGCTCCAGGTCCGCCGGGTCCGCCCGGAGCTTCAGGTCATCCCG |
| | GAAGCCCTGGTGCTCCAGGTTATCAGGGACCGCCCGGAGCTCCTGGACA |
| | AGCTGGTCCCTCCGGAGCTCCTGGTCCACCAGGTGCTATTGGAGCTAGTG |
| | GTCCTGCCGGAAAAGACGGTGCTTCCGGTAGACCTGGTAGACCCGGCGA |
| | AAGGGGTTTACCAGGTCCTCCCGGAGCTAAGGGTCCAGCCGGTATACCC |
| | GGTGCTCCTGGGATGAAGGGTCACAGAGGATTTGATGGTAGAAACGGAG |
| | AGAAAGGCGCTACCGGTGCTCCCGGACTGAAGGGTGCTAACGGTCTTCCT |
| | GGTGAGAACGGCGCTCCTGGACCTATGGGTCCACGTGGTGCTCCAGGAG |
| | AAAGAGGCAGACCAGGAGCTCCTGGTGCAGCTGGTGCTAGAGGTGCTGA |
| | TGGTGCCCGTGGTTCCGATGGAGCTCCCGGGCCACCCGGCCCTCCAGGTG |
| | CTGCTGGATTTCCTGGAAGCCCTGGTGCTAAGGGGGAGGTTGGTCCGGCT |
| | GGTGCTCCCGGAAGTAACGGTGCCCCAGGTGCTAGAGGCGAACCAGGCC |
| | CTCAGGGTGCTGCAGGAGCACAGGGACCGCCTGGTGCTCCTGGTATTAAT |
| | GGTTCGCCTGGAGCTAAAGGTGAAATGGGGCCCGCAGGAGCTCCCGGTG |
| | CGCCTGGTCTTATGGGTGCCAGGGGTCCTCCAGGCCCGGCCGGTGCAAAT |
| | GGTGCTCCCGGATTACGAGGAGCTGCTGGTGAACCTGGTAAAAACGGTG |
| | CCAAAGGAGAACCAGGTCCTCGTGGAGCTCGTGGTGAAGCTGGCATTCC |
| | CGGTGCTCCTGGTGCAAAAGGTGAGGACGGTGCTGACGGTTCCCCTGGTG |
| | AGCCAGGTGCGAACGGACTGCCAGGTGCAGCCGGAGCTCGAGGAGCTCC |
| | AGGATTCAGGGGAGCTGCCGGTCCTAACGGCATTCCTGGTGCTAAAGGG |
| | CCCGCCGGTGAAAGGGGAGCTCCCGGTCCAGCAGGCCCTCGTGGAGCAG |
| | CTGGTGAGCCTGGACGTGACGGTGCTCCAGGAGGGCCAGGTATGAGGGG |
| | TGCTCCCGGGTCCCCTGGCGGTCCTGGAGCTGATGGAAAACCAGGGCCA |
| | CCAGGTGCTCAGGGTGAAAGCGGACGTCCAGGCGCTCCCGGCCCTTCAG |
| | GTCCAAGGGGTGCTCCTGGTGTCATGGGTTTCCCCGGTGCTAAGGGTAAT |
| | GACGGAGCACCGGGTGCTAATGGTGAACGTGGTGGCCCAGGTGCTCCAG |
| | GACCCCAAGGTCCACCAGGAGCTAACGGTGAGACAGGTCCTCAAGGAGC |
| | TCCAGGACCTACCGGTCCTGGAGGAGCTAAGGGAGATACGGGACCGCCA |
| | GGAGCTCAAGGATTGCAAGGTTTGCCTGGTGCTGGAGGCCCTCCCGGAG |
| | AAAATGGTGCTCCTGGAGAGCCAGGACCAAAAGGCGCTGCTGGAGCCCC |
| | AGGTGCACCCGGAGCTAAGGGAGACGCCGGTGCTCCGGGTGAGCGTGGT |
| | CCTCCGGCAATTGCTGGTATTGGTGGAGAAAAGGCCGGCGGTTTCGCTCC |
| | ATATTATGGT |
| 1023 | GACGTCAAATCTGGTGTTGCTGTCGGAGGTTTAGCAGGCTACCCTGGTCC |
| | CGCAGGGCCCCCAGGTCCGCCGGGTCCGCCCGGAACATCAGGTCATCCC |
| | GGAAGCCCTGGTTCACCAGGTTATCAGGGACCGCCCGGAGAGCCTGGAC |
| | AAGCTGGTCCCTCCGGACCCCCTGGTCCACCAGGTGCTATTGGACCAAGT |
| | GGTCCTGCCGGAAAAGACGGTGAATCCGGTAGACCTGGTAGACCCGGCG |
| | AAAGGGGTTTACCAGGTCCTCCCGGAATTAAGGGTCCAGCCGGTATACCC |
| | GGTTTTCCTGGGATGAAGGGTCACAGAGGATTTGATGGTAGAAACGGAG |
| | AGAAAGGCGAAACCGGTGCTCCCGGACTGAAGGGTGAAAACGGTCTTCC |
| | TGGTGAGAACGGCGCTCCTGGACCTATGGGTCCACGTGGTGCTCCAGGA |
| | GAAAGAGGCAGACCAGGATTGCCTGGTGCAGCTGGTGCTAGAGGTAACG |
| | ATGGTGCCCGTGGTTCCGATGGACAACCCGGGCCACCCGGCCCTCCAGGT |
| | ACCGCTGGATTTCCTGGAAGCCCTGGTGCTAAGGGGGAGGTTGGTCCGGC |
| | TGGTAGTCCCGGAAGTAACGGTGCCCCAGGTCAAAGAGGCGAACCAGGC |
| | CCTCAGGGTCACGCAGGAGCACAGGGACCGCCTGGTCCTCCTGGTATTAA |
| | TGGTTCGCCTGGAGGAAAAGGTGAAATGGGGCCCGCAGGAATCCCCGGT |
| | GCGCCTGGTCTTATGGGTGCCAGGGGTCCTCCAGGCCCGGCCGGTGCAAA |
| | TGGTGCTCCCGGATTACGAGGAGGAGCTGGTGAACCTGGTAAAAACGGT |
| | GCCAAAGGAGAACCAGGTCCTCGTGGAGAGCGTGGTGAAGCTGGCATTC |
| | CCGGTGTGCCTGGTGCAAAAGGTGAGGACGGTAAGGACGGTTCCCCTGG |
| | TGAGCCAGGTGCGAACGGACTGCCAGGTGCAGCCGGAGAGCGAGGAGCT |
| | CCAGGATTCAGGGGACCAGCCGGTCCTAACGGCATTCCTGGTGAAAAAG |
| | GGCCCGCCGGTGAAAGGGGAGCTCCCGGTCCAGCAGGCCCTCGTGGAGC |
| | AGCTGGTGAGCCTGGACGTGACGGTGTCCCAGGAGGGCCAGGTATGAGG |
| | GGTATGCCCGGGTCCCCTGGCGGTCCTGGATCGGATGGAAAACCAGGGC |
| | CACCAGGTTCGCAGGGTGAAAGCGGACGTCCAGGCCCACCCGGCCCTTC |
| | AGGTCCAAGGGGTCAGCCTGGTGTCATGGGTTTCCCCGGTCCAAAGGGTA |
| | ATGACGGAGCACCGGGTAAAAATGGTGAACGTGGTGGCCCAGGTGGTCC |
| | AGGACCCCAAGGTCCACCAGGAAAAAACGGTGAGACAGGTCCTCAAGGA |
| | CCTCCAGGACCTACCGGTCCTGGAGGAGATAAGGGAGATACGGGACCGC |
| | CAGGACCTCAAGGATTGCAAGGTTTGCCTGGTACAGGAGGCCCTCCCGG |
| | AGAAAATGGTAAGCCTGGAGAGCCAGGACCAAAAGGCGATGCTGGAGC |
| | CCCAGGTGCACCCGGAGGTAAGGGAGACGCCGGTGCTCCGGGTGAGCGT |
| | GGTCCTCCGGCAATTGCTGGTATTGGTGGAGAAAAGGCCGGCGGTTTCGC |
| | TCCATATTATGGT |
| 1024 | GACGTCAAATCTGGTGTTGCTGTTGGAGGTTTAGCAGGCTACCCTGGTCC |
| | CGCAGGGCCCCCAGGTCCGCCGGGTCCGCCCGGAACATCAGGTCATCCC |
| | GGAAGCCCTGGTTCACCAGGTTATCAGGGACCGCCCGGAGAGCCTGGAC |
| | AAGCTGGTCCCTCCGGACCCCCTGGTCCACCAGGTGCTATTGGACCAAGT |
| | GGTCCTGCCGGAAAAGACGGTGAATCCGGTAGACCTGGTAGACCCGGCG |
| | AAAGGGGTTTACCAGGTCCTCCCGGAATTAAGGGTCCAGCCGGTATACCC |
| | GGTTTTCCTGGGATGAAGGGTCACAGAGGATTTGATGGTAGAAACGGAG |
| | AGAAAGGCGAAACCGGTGCTCCCGGACTGAAGGGTGAAAACGGTCTTCC |
| | TGGTGAGAACGGCGCTCCTGGACCTATGGGTCCACGTGGTGCTCCAGGA |
| | GAAAGAGGCAGACCAGGATTGCCTGGTGCAGCTGGTGCTAGAGGTAACG |
| | ATGGTGCCCGTGGTTCCGATGGACAACCCGGGCCACCCGGCCCTCCAGGT |
| | GCTATTGGACCATCTGGTCCTGCTGGAAAGGATGGAGAGTCAGGTCGTCC |
| | AGGTCGTCCTGGAGAAAGGGGCTTGCCTGGACCTCCCGGAATTAAGGGA |
| | CCAGCTGGCATTCCCGGCTTCCCCGGTATGAAAGGACATAGAGGCTTCGA |
| | CGGTCGTAATGGTGAGAAAGGTGAGACCGGAGCACCAGGTTTGAAAGGA |
| | GAGAACGGATTACCTGGAGAAAATGGCGCCCCTGGACCAATGGGACCTC |
| | GTGGAGCTCCTGGAGAACGTGGTAGGCCTGGATTACCAGGAGCAGCCGG |
| | CGCAAGAGGCAATGATGGTGCACGTGGTTCCGACGGACAGCCTGGTCCA |
| | CCAGGACCCCCCGCAATTGCTGGTATTGGTGGAGAAAAGGCCGGCGGTT |
| | TCGCTCCATATTATGGT |
| 1025 | GACGTCAAATCTGGTGTTGCTGTTGGAGGTTTAGCAGGCTACCCTGGTCC |
| | CGCAGGGCCCCCAGGTCCGCCGGGTCCGCCCGGAACATCAGGTCATCCC |
| | GGAAGCCCTGGTTCACCAGGTTATCAGGGACCGCCCGGAGAGCCTGGAC |
| | AAGCTGGTCCCTCCGGACCCCCTGGTCCACCAGGTGCTATTGGACCAAGT |
| | GGTCCTGCCGGAAAAGACGGTGAATCCGGTAGACCTGGTAGACCCGGCG |
| | AAAGGGGTTTACCAGGTCCTCCCGGAATTAAGGGTCCAGCCGGTATACCC |
| | GGTTTTCCTGGGATGAAGGGTCACAGAGGATTTGATGGTAGAAACGGAG |
| | AGAAAGGCGAAACCGGTGCTCCCGGACTGAAGGGTGAAAACGGTCTTCC |
| | TGGTGAGAACGGCGCTCCTGGACCTATGGGTCCACGTGGTGCTCCAGGA |
| | GAAAGAGGCAGACCAGGATTGCCTGGTGCAGCTGGTGCTAGAGGTAACG |
| | ATGGTGCCCGTGGTTCCGATGGACAACCCGGGCCACCCGGCCCTCCAGGT |
| | GCTATTGGACCATCTGGTCCTGCTGGAAAGGATGGAGAGTCAGGTCGTCC |
| | AGGTCGTCCTGGAGAAAGGGGCTTGCCTGGACCTCCCGGAATTAAGGGA |
| | CCAGCTGGCATTCCCGGCTTCCCCGGTATGAAAGGACATAGAGGCTTCGA |
| | CGGTCGTAATGGTGAGAAAGGTGAGACCGGAGCACCAGGTTTGAAAGGA |
| | GAGAACGGATTACCTGGAGAAAATGGCGCCCCTGGACCAATGGGACCTC |
| | GTGGAGCTCCTGGAGAACGTGGTAGGCCTGGATTACCAGGAGCAGCCGG |
| | CGCAAGAGGCAATGATGGTGCACGTGGTTCCGACGGACAGCCTGGTCCA |
| | CCAGGACCCCCCGCAATTGCTGGTATTGGTGGAGAAAAGGCCGGCGGTT |
| | TCGCTCCATATTATGGT |
| 1026 | GACGTCAAATCTGGTGTTGCTGTTGGAGGTTTAGCAGGCTACCCTGGTCC |
| | CGCAGGGCCCCCAGGTCCGCCGGGTCCGCCCGGAACATCAGGTCATCCC |
| | GGAAGCCCTGGTTCACCAGGTTATCAGGGACCGCCCGGAGAGCCTGGAC |
| | AAGCTGGTCCCTCCGGACCCCCTGGTCCACCAGGTGCTATTGGACCAAGT |
| | GGTCCTGCCGGAAAAGACGGTGAATCCGGTAGACCTGGTAGACCCGGCG |
| | AAAGGGGTTTACCAGGTCCTCCCGGAATTAAGGGTCCAGCCGGTATACCC |
| | GGTTTTCCTGGGATGAAGGGTCACAGAGGATTTGATGGTAGAAACGGAG |
| | AGAAAGGCGAAACCGGTGCTCCCGGACTGAAGGGTGAAAACGGTCTTCC |
| | TGGTGAGAACGGCGCTCCTGGACCTATGGGTCCACGTGGTGCTCCAGGA |
| | GAAAGAGGCAGACCAGGATTGCCTGGTGCAGCTGGTGCTAGAGGTAACG |
| | ATGGTGCCCGTGGTTCCGATGGACAACCCGGGCCACCCGGCCCTCCAGGT |
| | GCTATTGGTCCATCTGGGCCTGCTGGGAAGGATGGTGAATCGGGTCGGCC |
| | TGGTCGGCCTGGTGAACGTGGCCTTCCGGGTCCTCCCGGTATTAAAGGAC |
| | CGGCTGGTATTCCCGGTTTTCCTGGTATGAAAGGTCATAGAGGTTTTGAT |
| | GGTAGAAATGGCGAAAAGGGTGAAACTGGTGCTCCTGGATTGAAAGGTG |
| | AGAATGGTCTGCCTGGGGAGAATGGAGCGCCTGGTCCAATGGGTCCAAG |
| | AGGTGCTCCTGGTGAAAGAGGTAGACCGGGACTTCCCGGGGCAGCTGGC |
| | GCTCGAGGTAATGATGGTGCTAGAGGGTCTGATGGTCAACCGGGTCCAC |
| | CCGGTCCGCCAGGTGCAATAGGTCCTAGCGGACCGGCAGGCAAAGACGG |
| | GGAATCAGGTAGACCAGGAAGGCCCGGGGAGAGAGGGCTACCTGGCCCC |
| | CCCGGGATTAAGGGACCTGCAGGAATCCCTGGCTTCCCAGGCATGAAGG |
| | GTCATAGGGGCTTTGATGGAAGAAACGGAGAAAAGGGTGAAACGGGCG |
| | CGCCTGGCCTTAAAGGGGAAAACGGGCTGCCTGGGGAGAACGGAGCTCC |
| | GGGCCCCATGGGGCCGAGAGGCGCCCCAGGTGAAAGAGGCAGACCGGG |
| | ATTGCCAGGGGCTGCTGGCGCACGTGGTAACGACGGGGCAAGAGGGAGC |
| | GACGGTCAACCTGGCCCGCCGGGTCCACCAGCAATTGCTGGTATTGGTGG |
| | AGAAAAGGCCGGCGGTTTCGCTCCATATTATGGT |
| 1027 | GACGTCAAATCTGGTGTTGCTGTTGGAGGTTTAGCAGGCTACCCTGGTCC |
| | CGCAGGGCCCCCAGGTCCGCCGGGTCCGCCCGGAACATCAGGTCATCCC |
| | GGAAGCCCTGGTTCACCAGGTTATCAGGGACCGCCCGGAGAGCCTGGAC |
| | AAGCTGGTCCCTCCGGACCCCCTGGTCCACCAGGTGCTATTGGACCAAGT |
| | GGTCCTGCCGGAAAAGACGGTGAATCCGGTAGACCTGGTAGACCCGGCG |
| | AAAGGGGTTTACCAGGTCCTCCCGGAATTAAGGGTCCAGCCGGTATACCC |
| | GGTTTTCCTGGGATGAAGGGTCACAGAGGATTTGATGGTAGAAACGGAG |
| | AGAAAGGCGAAACCGGTGCTCCCGGACTGAAGGGTGAAAACGGTCTTCC |
| | TGGTGAGAACGGCGCTCCTGGACCTATGGGTCCACGTGGTGCTCCAGGA |
| | GAAAGAGGCAGACCAGGATTGCCTGGTGCAGCTGGTGCTAGAGGTAACG |
| | ATGGTGCCCGTGGTTCCGATGGACAACCCGGGCCACCCGGCCCTCCAGGT |
| | ACCGCTGGATTTCCTGGAAGCCCTGGTGCTAAGGGGGAGGTTGGTCCGGC |
| | TGGTAGTCCCGGAAGTAACGGTGCCCCAGGTCAAAGAGGCGAACCAGGC |
| | CCTCAGGGTCACGCAGGAGCACAGGGACCGCCTGGTCCTCCTGGTATTAA |
| | TGGTTCGCCTGGAGGAAAAGGTGAAATGGGGCCCGCAGGAATCCCCGGT |
| | GCGCCTGGTCTTATGGGTGCCAGGGGTCCTCCAGGCCCGGCCGGTGCAAA |
| | TGGTGCTCCCGGATTACGAGGAGGAGCTGGTGAACCTGGTAAAAACGGT |
| | GCCAAAGGAGAACCAGGTCCTCGTGGAGAGCGTGGTGAAGCTGGCATTC |
| | CCGGTGTGCCTGGTGCAAAAGGTGAGGACGGTAAGGACGGTTCCCCTGG |
| | TGAGCCAGGTGCGAACGGACTGCCAGGTGCAGCCGGAGAGCGAGGAGCT |
| | CCAGGATTCAGGGGACCAGCCGGTCCTAACGGCATTCCTGGTGAAAAAG |
| | GGCCCGCCGGTGAAAGGGGAGCTCCCGGTCCAGCAGGCCCTCGTGGAGC |
| | AGCTGGTGAGCCTGGACGTGACGGTGTCCCAGGAGGGCCAGGTATGAGG |
| | GGTATGCCCGGGTCCCCTGGCGGTCCTGGATCGGATGGAAAACCAGGGC |
| | CACCAGGTTCGCAGGGTGAAAGCGGACGTCCAGGCCCACCCGGCCCTTC |
| | AGGTCCAAGGGGTCAGCCTGGTGTCATGGGTTTCCCCGGTCCAAAGGGTC |
| | ACCGTGGATTTCCGGGTAAAAATGGTGAACGTGGTGGCCCAGGTGGTCC |
| | AGGACCCCAAGGTCCACCAGGAAAAAACGGTGAGACAGGTCCTCAAGGA |
| | CCTCCAGGACCTACCGGTCCTGGAGGAGATAAGGGAGATACGGGACCGC |
| | CAGGACCTCAAGGATTGCAAGGTTTGCCTGGTACAGGAGGCCCTCCCGG |
| | AGAAAATGGTAAGCCTGGAGAGCCAGGACCAAAAGGCGATGCTGGAGC |
| | CCCAGGTGCACCCGGAGGTAAGGGAGACGCCGGTGCTCCGGGTGAGCGT |
| | GGTCCTCCGGCAATTGCTGGTATTGGTGGAGAAAAGGCCGGCGGTTTCGC |
| | TCCATATTATGGT |
| 1028 | GACGTCAAATCTGGTGTTGCTGTTGGAGGTTTAGCAGGCTACCCTGGTCC |
| | CGCAGGGCCCCCAGGTCCGCCGGGTCCGCCCGGAACATCAGGTCATCCC |
| | GGAAGCCCTGGTTCACCAGGTTATCAGGGACCGCCCGGAGAGCCTGGAC |
| | AAGCTGGTCCCTCCGGACCCCCTGGTCCACCAGGTGCTATTGGACCAAGT |
| | GGTCCTGCCGGAAAAGACGGTGAATCCGGTAGACCTGGTAGACCCGGCG |
| | CCGCTGGTTTACCAGGTCCTCCCGGAATTAAGGGTCCAGCCGGTATACCC |
| | GGTTTTCCTGGGATGAAGGGTCACAGAGGATTTGATGGTAGAAACGGAG |
| | AGAAAGGCGAAACCGGTGCTCCCGGACTGAAGGGTGAAAACGGTCTTCC |
| | TGGTGCCGCTGGCGCTCCTGGACCTATGGGTCCACGTGGTGCTCCAGGAG |
| | CCGCTGGCAGACCAGGATTGCCTGGTGCAGCTGGTGCTAGAGGTAACGA |
| | TGGTGCCCGTGGTTCCGATGGACAACCCGGGCCACCCGGCCCTCCAGGTA |
| | CCGCTGGATTTCCTGGAAGCCCTGGTGCTAAGGGGGAGGTTGGTCCGGCT |
| | GGTAGTCCCGGAAGTAACGGTGCCCCAGGTCAAAGAGGCGAACCAGGCC |
| | CTCAGGGTCACGCAGGAGCACAGGGACCGCCTGGTCCTCCTGGTATTAAT |
| | GGTTCGCCTGGAGGAAAAGGTGAAATGGGGCCCGCAGGAATCCCCGGTG |
| | CGCCTGGTCTTATGGGTGCCAGGGGTCCTCCAGGCCCGGCCGGTGCAAAT |
| | GGTGCTCCCGGATTACGAGGAGGAGCTGGTGAACCTGGTAAAAACGGTG |
| | CCAAAGGAGAACCAGGTCCTCGTGGAGAGCGTGGTGAAGCTGGCATTCC |
| | CGGTGTGCCTGGTGCAAAAGGTGAGGACGGTAAGGACGGTTCCCCTGGT |
| | GAGCCAGGTGCGAACGGACTGCCAGGTGCAGCCGGAGAGCGAGGAGCTC |
| | CAGGATTCAGGGGACCAGCCGGTCCTAACGGCATTCCTGGTGAAAAAGG |
| | GCCCGCCGGTGAAAGGGGAGCTCCCGGTCCAGCAGGCCCTCGTGGAGCA |
| | GCTGGTGAGCCTGGACGTGACGGTGTCCCAGGAGGGCCAGGTATGAGGG |
| | GTATGCCCGGGTCCCCTGGCGGTCCTGGATCGGATGGAAAACCAGGGCC |
| | ACCAGGTTCGCAGGGTGAAAGCGGACGTCCAGGCCCACCCGGCCCTTCA |
| | GGTCCAAGGGGTCAGCCTGGTGTCATGGGTTTCCCCGGTCCAAAGGGTAA |
| | TGACGGAGCACCGGGTAAAAATGGTGAACGTGGTGGCCCAGGTGGTCCA |
| | GGACCCCAAGGTCCACCAGGAAAAAACGGTGAGACAGGTCCTCAAGGAC |
| | CTCCAGGACCTACCGGTCCTGGAGGAGATAAGGGAGATACGGGACCGCC |
| | AGGACCTCAAGGATTGCAAGGTTTGCCTGGTACAGGAGGCCCTCCCGGA |
| | GAAAATGGTAAGCCTGGAGAGCCAGGACCAAAAGGCGATGCTGGAGCCC |
| | CAGGTGCACCCGGAGGTAAGGGAGACGCCGGTGCTCCGGGTGCCGCTGG |
| | TCCTCCGAAGCAATTGCTGGTATTGGTGGAGAAAAGGCCGGCGGTTTCGC |
| | TCCATATTATGGTTAATCAAGAGGATGTCAGAATGCCATTTGCC |
| 1029 | GACGTCAAATCTGGTGTTGCTGTTGGAGGTTTAGCAGGCTACCCTGGTCC |
| | CGCAGGGCCCCCAGGTCCGCCGGGTCCGCCCGGAACATCAGGTCATCCC |
| | GGAAGCCCTGGTTCACCAGGTTATCAGGGACCGCCCGGAGAGCCTGGAC |
| | AAGCTGGTCCCTCCGGACCCCCTGGTCCACCAGGTGCTATTGGACCAAGT |
| | GGTCCTGCCGGAAAAGACGGTGAATCCGGTAAACCTGGTAGACCCGGCG |
| | AAAGGGGTTTACCAGGTCCTCCCGGAATTAAGGGTCCAGCCGGTATACCC |
| | GGTTTTCCTGGGATGAAGGGTCACAGAGGATTTGATGGTAAAAACGGAG |
| | AGAAAGGCGAAACCGGTGCTCCCGGACTGAAGGGTGAAAACGGTCTTCC |
| | TGGTGAGAACGGCGCTCCTGGACCTATGGGTCCAAAGGGTGCTCCAGGA |
| | GAAAGAGGCAAACCAGGATTGCCTGGTGCAGCTGGTGCTAAGGGTAACG |
| | ATGGTGCCAAAGGTTCCGATGGACAACCCGGGCCACCCGGCCCTCCAGG |
| | TACCGCTGGATTTCCTGGAAGCCCTGGTGCTAAGGGGGAGGTTGGTCCGG |
| | CTGGTAGTCCCGGAAGTAACGGTGCCCCAGGTCAAAAAGGCGAACCAGG |
| | CCCTCAGGGTCACGCAGGAGCACAGGGACCGCCTGGTCCTCCTGGTATTA |
| | ATGGTTCGCCTGGAGGAAAAGGTGAAATGGGGCCCGCAGGAATCCCCGG |
| | TGCGCCTGGTCTTATGGGTGCCAAGGGTCCTCCAGGCCCGGCCGGTGCAA |
| | ATGGTGCTCCCGGATTAAAAGGAGGAGCTGGTGAACCTGGTAAAAACGG |
| | TGCCAAAGGAGAACCAGGTCCTAAAGGAGAGAAGGGTGAAGCTGGCATT |
| | CCCGGTGTGCCTGGTGCAAAAGGTGAGGACGGTAAGGACGGTTCCCCTG |
| | GTGAGCCAGGTGCGAACGGACTGCCAGGTGCAGCCGGAGAGAAAGGAG |
| | CTCCAGGATTCAAGGGACCAGCCGGTCCTAACGGCATTCCTGGTGAAAA |
| | AGGGCCCGCCGGTGAAAAAGGAGCTCCCGGTCCAGCAGGCCCTAAGGGA |
| | GCAGCTGGTGAGCCTGGAAAAGACGGTGTCCCAGGAGGGCCAGGTATGA |
| | AAGGTATGCCCGGGTCCCCTGGCGGTCCTGGATCGGATGGAAAACCAGG |
| | GCCACCAGGTTCGCAGGGTGAAAGCGGAAAACCAGGCCCACCCGGCCCT |
| | TCAGGTCCAAAAGGTCAGCCTGGTGTCATGGGTTTCCCCGGTCCAAAGGG |
| | TAATGACGGAGCACCGGGTAAAAATGGTGAAAAGGGTGGCCCAGGTGGT |
| | CCAGGACCCCAAGGTCCACCAGGAAAAAACGGTGAGACAGGTCCTCAAG |
| | GACCTCCAGGACCTACCGGTCCTGGAGGAGATAAGGGAGATACGGGACC |
| | GCCAGGACCTCAAGGATTGCAAGGTTTGCCTGGTACAGGAGGCCCTCCC |
| | GGAGAAAATGGTAAGCCTGGAGAGCCAGGACCAAAAGGCGATGCTGGA |
| | GCCCCAGGTGCACCCGGAGGTAAGGGAGACGCCGGTGCTCCGGGTGAGC |
| | GTGGTCCTCCGGCAATTGCTGGTATTGGTGGAGAAAAGGCCGGCGGTTTC |
| | GCTCCATATTATGGT |
| 1030 | GATGTCAAGTCAGGTGTGGCCGTGGGTGGCCTAGCCGGCTACCCAGGCC |
| | CAGCTGGTCCACCCGGCCCACCTGGCCCCCCCGGTACCTCAGGACATCCT |
| | GGCTCCCCTGGTTCTCCAGGTTACCAAGGCCCACCCGGTGAGCCTGGCCA |
| | GGCAGGCCCTTCCGGCCCTCCAGGACCCCCTGGAGCCATTGGACCTTCAG |
| | GTCCAGCTGGAAAAGATGGCGAGTCAGGAAGACCCGGCCGTCCAGGAGA |
| | ACGTGGCCTACCCGGTCCCCCCGGTATCAAGGGCCCCGCAGGTATTCCCG |
| | GTTTTCCTGGAATGAAGGGACACCGTGGATTTGATGGTAGGAACGGTGA |
| | AAAGGGCGAGACAGGTGCACCAGGTCTTAAGGGCGAGAACGGTTTGCCC |
| | GGTGAGAACGGCGCTCCAGGTCCTATGGGTCCCCGTGGAGCTCCTGGCG |
| | AGCGTGGAAGACCTGGTTTGCCTGGTGCTGCCGGTGCCAGGGGAAATGA |
| | TGGAGCACGTGGTTCTGATGGCCAGCCTGGACCCCCCGGACCCCCTGGAA |
| | CTGCAGGATTCCCCGGAGCTGTGGGCGCAAAAGGCGAGGCAGGTCCCCA |
| | AGGTCCCAGAGGTAGTGAGGGACCTCAGGGTGTCAGAGGAGAGCCTGGT |
| | CCTCCTGGCCCCGCAGGAGCTGCAGGCCCAGCCGGACCACCCGGAGCCG |
| | ATGGCCAACCCGGTGCCAAGGGTGCTATGGGTGCTCCCGGTATCGCTGGT |
| | GCCCCTGGTTTTCCAGGTGCACGTGGACCACCCGGACCCCAAGGCGCCGG |
| | TGGTCCCCCTGGACCCAAGGGTGGCGCCGGTGAACCCGGCGCCCCTGGA |
| | GCTAAAGGAGATACTGGCGCCAAGGGAGAGAGAGGCCCCGTCGGAGTGC |
| | AGGGCCCACCCGGACCCGCCGGTGAAGAGGGAAAGAGGGGAGCCAGGG |
| | GTGAACCCGGCCCAACTGGCTTACCAGGTCCACCAGGTGAAAGGGGTGG |
| | ACCTGGTTTTCGTGGCTTCCCTGGTGCCGATGGAATCCCAGGAGAGAAGG |
| | GACCCGCAGGAGAGCGTGGCGCACCCGGACCTGCAGGTCCAAGGGGCGC |
| | CGCCGGAGAACCAGGTAGAGATGGTGTCCCCGGCGGACCCGGTATGAGA |
| | GGCATGCCCGGTTCCCCCGGCGGACCTGGCTCAGATGGCAAGCCAGGTC |
| | CCCCCGGCAGTCAAGGTGAATCAGGAAGACCTGGACCCCCAGGCCCTAG |
| | TGGACCTCGTGGTCAGCCAGGAGTGATGGGCTTTCCTGGTCCTAAGGGAA |
| | ATGACGGCGCTCCCGGCAAAAATGGTGAGAGAGGAGGACCCGGAGGCCC |
| | AGGACCACAGGGCCCACCAGGCAAGAACGGAGAAACAGGTCCTCAGGG |
| | CCCCCCAGGACCCACTGGTCCCGGAGGCGATAAAGGCGATACTGGTCCT |
| | CCTGGTCCTCAAGGCCTACAAGGATTGCCAGGAACTGGAGGCCCCCCAG |
| | GAGAGAACGGAAAACCCGGTGAACCAGGTCCCAAGGGAGACGCAGGTG |
| | CTCCAGGTGCACCCGGTGGTAAGGGAGACGCAGGCGCACCTGGTGAGAG |
| | AGGACCTCCTGCAATAGCCGGCATTGGAGGTGAGAAAGCCGGTGGTTTT |
| | GCTCCATACTATGGT |
| 1031 | GACGTCAAATCTGGTGTTGCTGTTGGAGGTATTGCAGGCTACCCTGGTCC |
| | CGCAGGGCCCCCAGGTCCGCCGGGTCCGCCCGGAACATCAGGTCATCCC |
| | GGAAGCCCTGGTTCACCAGGTTATCAGGGACCGCCCGGAGAGCCTGGAC |
| | AAGCTGGTCCCTCCGGACCCCCTGGTCCACCAGGTGCTTTAGGACCAAGT |
| | GGTCCTGCCGGAAAAGACGGTGAATCCGGTAGACCTGGTAGACCCGGCG |
| | AAAGGGGTGTTCCAGGTCCTCCCGGAGTTAAGGGTCCAGCCGGTTTACCC |
| | GGTTTTCCTGGGATGAAGGGTCACAGAGGATTTGATGGTAGAAACGGAG |
| | AGAAAGGCGAAACCGGTGCTCCCGGACTGAAGGGTGAAAACGGTCTTCC |
| | TGGTGAGAACGGCGCTCCTGGACCTATGGGTCCACGTGGTGCTCCAGGA |
| | GAAAGAGGCAGACCAGGATTGCCTGGTGCAGCTGGTGCTAGAGGTAACG |
| | ATGGTGCCCGTGGTTCCGATGGACAACCCGGGCCACCCGGCCCTCCAGGT |
| | ACCGCTGGATTTCCTGGAAGCCCTGGTGCTAAGGGGGAGTTGGGTCCGGC |
| | TGGTAGTCCCGGAAGTAACGGTGCCCCAGGTCAAAGAGGCGAACCAGGC |
| | CCTCAGGGTCACGCAGGAGCACAGGGACCGCCTGGTCCTCCTGGTTTGAA |
| | TGGTTCGCCTGGAGGAAAAGGTGAAATGGGGCCCGCAGGAGTTCCCGGT |
| | GCGCCTGGTATTATGGGTGCCAGGGGTCCTCCAGGCCCGGCCGGTGCAA |
| | ATGGTGCTCCCGGAATACGAGGAGGAGCTGGTGAACCTGGTAAAAACGG |
| | TGCCAAAGGAGAACCAGGTCCTCGTGGAGAGCGTGGTGAAGCTGGCTTA |
| | CCCGGTTTACCTGGTGCAAAAGGTGAGGACGGTAAGGACGGTTCCCCTG |
| | GTGAGCCAGGTGCGAACGGAGTTCCAGGTGCAGCCGGAGAGCGAGGAGC |
| | TCCAGGATTCAGGGGACCAGCCGGTCCTAACGGCTTGCCTGGTGAAAAA |
| | GGGCCCGCCGGTGAAAGGGGAGCTCCCGGTCCAGCAGGCCCTCGTGGAG |
| | CAGCTGGTGAGCCTGGACGTGACGGTATTCCAGGAGGGCCAGGTATGAG |
| | GGGTATGCCCGGGTCCCCTGGCGGTCCTGGATCGGATGGAAAACCAGGG |
| | CCACCAGGTTCGCAGGGTGAAAGCGGACGTCCAGGCCCACCCGGCCCTT |
| | CAGGTCCAAGGGGTCAGCCTGGTTTGATGGGTTTCCCCGGTCCAAAGGGT |
| | AATGACGGAGCACCGGGTAAAAATGGTGAACGTGGTGGCCCAGGTGGTC |
| | CAGGACCCCAAGGTCCACCAGGAAAAAACGGTGAGACAGGTCCTCAAGG |
| | ACCTCCAGGACCTACCGGTCCTGGAGGAGATAAGGGAGATACGGGACCG |
| | CCAGGACCTCAAGGAGTTCAAGGTTTGCCTGGTACAGGAGGCCCTCCCG |
| | GAGAAAATGGTAAGCCTGGAGAGCCAGGACCAAAAGGCGATGCTGGAG |
| | CCCCAGGTGCACCCGGAGGTAAGGGAGACGCCGGTGCTCCGGGTGAGCG |
| | TGGTCCTCCGGCAATTGCTGGTATTGGTGGAGAAAAGGCCGGCGGTTTCG |
| | CTCCATATTATGGT |
| 1032 | GACGTCAAATCTGGTGTTGCTGTTGGAGGTTTAGCAGGCTACCCTGGTCC |
| | CGCAGGGCCCCCAGGTCCGCCGGGTCCGCCCGGAGCAGCAGGTCATCCC |
| | GGAGCACCTGGTGCACCAGGTTATCAGGGACCGCCCGGAGAGCCTGGAC |
| | AAGCTGGTCCCGCTGGACCCCCTGGTCCACCAGGTGCTATTGGACCAGCT |
| | GGTCCTGCCGGAAAAGACGGTGAAGCAGGTAGACCTGGTAGACCCGGCG |
| | AAAGGGGTTTACCAGGTCCTCCCGGAATTAAGGGTCCAGCCGGTATACCC |
| | GGTTTTCCTGGGATGAAGGGTCACAGAGGATTTGATGGTAGAGATGGAG |
| | AGAAAGGCGAAGCAGGTGCTCCCGGACTGAAGGGTGAAGATGGTCTTCC |
| | TGGTGAGAACGGCGCTCCTGGACCTATGGGTCCACGTGGTGCTCCAGGA |
| | GAAAGAGGCAGACCAGGATTGCCTGGTGCAGCTGGTGCTAGAGGTGATG |
| | ATGGTGCCCGTGGTGCTGATGGACAACCCGGGCCACCCGGCCCTCCAGGT |
| | GCAGCTGGATTTCCTGGAGCTCCTGGTGCTAAGGGGGAGGTTGGTCCGGC |
| | TGGTGCTCCCGGAGCAGATGGTGCCCCAGGTCAAAGAGGCGAACCAGGC |
| | CCTCAGGGTCACGCAGGAGCACAGGGACCGCCTGGTCCTCCTGGTATTGA |
| | TGGTGCTCCTGGAGGAAAAGGTGAAATGGGGCCCGCAGGAATCCCCGGT |
| | GCGCCTGGTCTTATGGGTGCCAGGGGTCCTCCAGGCCCGGCCGGTGCAGA |
| | TGGTGCTCCCGGATTACGAGGAGGAGCTGGTGAACCTGGTAAAGATGGT |
| | GCCAAAGGAGAACCAGGTCCTCGTGGAGAGCGTGGTGAAGCTGGCATTC |
| | CCGGTGTGCCTGGTGCAAAAGGTGAGGACGGTAAGGACGGTGCTCCTGG |
| | TGAGCCAGGTGCGGATGGACTGCCAGGTGCAGCCGGAGAGCGAGGAGCT |
| | CCAGGATTCAGGGGACCAGCCGGTCCTGATGGCATTCCTGGTGAAAAAG |
| | GGCCCGCCGGTGAAAGGGGAGCTCCCGGTCCAGCAGGCCCTCGTGGAGC |
| | AGCTGGTGAGCCTGGACGTGACGGTGTCCCAGGAGGGCCAGGTATGAGG |
| | GGTATGCCCGGGGCCCCTGGCGGTCCTGGAGCTGATGGAAAACCAGGGC |
| | CACCAGGTGCTCAGGGTGAAGCTGGACGTCCAGGCCCACCCGGCCCTGC |
| | TGGTCCAAGGGGTCAGCCTGGTGTCATGGGTTTCCCCGGTCCAAAGGGTG |
| | ATGACGGAGCACCGGGTAAAGATGGTGAACGTGGTGGCCCAGGTGGTCC |
| | AGGACCCCAAGGTCCACCAGGAAAAGATGGTGAGGCTGGTCCTCAAGGA |
| | CCTCCAGGACCTGCTGGTCCTGGAGGAGATAAGGGAGATGCTGGACCGC |
| | CAGGACCTCAAGGATTGCAAGGTTTGCCTGGTGCTGGAGGCCCTCCCGGA |
| | GAAGATGGTAAGCCTGGAGAGCCAGGACCAAAAGGCGATGCTGGAGCCC |
| | CAGGTGCACCCGGAGGTAAGGGAGACGCCGGTGCTCCGGGTGAGCGTGG |
| | TCCTCCGGCAATTGCTGGTATTGGTGGAGAAAAGGCCGGCGGTTTCGCTC |
| | CATATTATGGT |
| 1033 | GACGTCAAATCTGGTGTTGCTGTTGGAGGTTTAGCAGGCTACCCTGGTCC |
| | CGCAGGGCCCCCAGGTCCGCCGGGTCCGCCCGGAACATCAGGTCATCCC |
| | GGAAGCCCTGGTTCACCAGGTTATCAGGGACCGCCCGGAGAGCCTGGAC |
| | AAGCTGGTCCCTCCGGACCCCCTGGTCCACCAGGTGCTATTGGACCAAGT |
| | GGTCCTGCCGGAAAAGACGGTGAATCCGGTAGACCTGGTAGACCCGGCG |
| | AAAGGGGTTTACCAGGTCCTCCCGGAATTAAGGGTCCAGCCGGTATACCC |
| | GGTTTTCCTGGGATGAAGGGTCACAGAGGATTTGATGGTAGAAACGGAG |
| | AGAAAGGCGAAACCGGTGCTCCCGGACTGAAGGGTGAAAACGGTCTTCC |
| | TGGTGAGAACGGCGCTCCTGGACCTATGGGTCCACGTGGTGCTCCAGGA |
| | GAAAGAGGCAGACCAGGATTGCCTGGTGCAGCTGGTGCTAGAGGTAACG |
| | ATGGTGCCCGTGGTTCCGATGGACAACCCGGGCCACCCGGCCCTCCAGGT |
| | ACCGCTGGATTTCCTGGAAGCCCTGGTGCTAAGGGGGAGGTTGGTCCGGC |
| | TGGTAGTCCCGGAAGTAACGGTGCCCCAGGTCAAAGAGGCGAACCAGGC |
| | CCTCAGGGTCACGCAGGAGCACAGGGACCGCCTGGTCCTCCTGGTATTAA |
| | TGGTTCGCCTGGAGGAAAAGGTGAAATGGGGCCCGCAGGAATCGAACCA |
| | GGAAGACCCGAGGGAGAGAAAGGAGGAGGTCGTGGTGGTGCTCCAGGC |
| | GCTCCAGGAAGAGGAGCAGGCAACGGTGAGGGAGCCCGTCCACCCCCTT |
| | TAATGGGTGGTGCAGGCGGTAACAAGGCTGGACCACTAGCTGCCCCAAT |
| | TCCCGGTGTGCCTGGTGCAAAAGGTGAGGACGGTAAGGACGGTTCCCCT |
| | GGTGAGCCAGGTGCGAACGGACTGCCAGGTGCAGCCGGAGAGCGAGGA |
| | GCTCCAGGATTCAGGGGACCAGCCGGTCCTAACGGCATTCCTGGTGAAA |
| | AAGGGCCCGCCGGTGAAAGGGGAGCTCCCGGTCCAGCAGGCCCTCGTGG |
| | AGCAGCTGGTGAGCCTGGACGTGACGGTGTCCCAGGAGGGCCAGGTATG |
| | AGGGGTATGCCCGGGTCCCCTGGCGGTCCTGGATCGGATGGAAAACCAG |
| | GGCCACCAGGTTCGCAGGGTGAAAGCGGACGTCCAGGCCCACCCGGCCC |
| | TTCAGGTCCAAGGGGTCAGCCTGGTGTCATGGGTTTCCCCGGTCCAAAGG |
| | GTAATGACGGAGCACCGGGTAAAAATGGTGAACGTGGTGGCCCAGGTGG |
| | TCCAGGACCCCAAGGTCCACCAGGAAAAAACGGTGAGACAGGTCCTCAA |
| | GGACCTCCAGGACCTACCGGTCCTGGAGGAGATAAGGGAGATACGGGAC |
| | CGCCAGGACCTCAAGGATTGCAAGGTTTGCCTGGTACAGGAGGCCCTCCC |
| | GGAGAAAATGGTAAGCCTGGAGAGCCAGGACCAAAAGGCGATGCTGGA |
| | GCCCCAGGTGCACCCGGAGGTAAGGGAGACGCCGGTGCTCCGGGTGAGC |
| | GTGGTCCTCCGGCAATTGCTGGTATTGGTGGAGAAAAGGCCGGCGGTTTC |
| | GCTCCATATTATGGT |
| 1034 | GACGTCAAATCTGGTGTTGCTGTTGGAGGTTTAGCAGGCTACCCTGGTCC |
| | CGCAGGGCCCCCAGGTCCGCCGGGTCCGCCCGGAACATCAGGTCATCCC |
| | GGAAGCCCTGGTTCACCAGGTTATCAGGGACCGCCCGGAGAGCCTGGAC |
| | AAGCTGGTCCCTCCGGACCCCCTGGTCCACCAGGTGCTATTGGACCAAGT |
| | GGTCCTGCCGGAAAAAGAGGTGAATCCGGTAGACCTGGTAGACCCGGCG |
| | AAAGGGGTTTACCAGGTCCTCCCGGAATTAAGGGTCCAGCCGGTATACCC |
| | GGTTTTCCTGGGATGAAGGGTCACAGAGGATTTAGAGGTAGAAACGGAG |
| | AGAAAGGCGAAACCGGTGCTCCCGGACTGAAGGGTGAAAACGGTCTTCC |
| | TGGTGAGAACGGCGCTCCTGGACCTATGGGTCCACGTGGTGCTCCAGGA |
| | GAAAGAGGCAGACCAGGATTGCCTGGTGCAGCTGGTGCTAGAGGTAACA |
| | GAGGTGCCCGTGGTTCCGATGGACAACCCGGGCCACCCGGCCCTCCAGG |
| | TACCGCTGGATTTCCTGGAAGCCCTGGTGCTAAGGGGAGAGTTGGTCCGG |
| | CTGGTAGTCCCGGAAGTAACGGTGCCCCAGGTCAAAGAGGCGAACCAGG |
| | CCCTCAGGGTCACGCAGGAGCACAGGGACCGCCTGGTCCTCCTGGTATTA |
| | ATGGTTCGCCTGGAGGAAAAGGTGAAATGGGGCCCGCAGGAATCCCCGG |
| | TGCGCCTGGTCTTATGGGTGCCAGGGGTCCTCCAGGCCCGGCCGGTGCAA |
| | ATGGTGCTCCCGGATTACGAGGAGGAGCTGGTAGACCTGGTAAAAACGG |
| | TGCCAAAGGAGAACCAGGTCCTCGTGGAGAGCGTGGTGAAGCTGGCATT |
| | CCCGGTGTGCCTGGTGCAAAAGGTGAGGACGGTAAGGACGGTTCCCCTG |
| | GTGAGCCAGGTGCGAACGGACTGCCAGGTGCAGCCGGAGAGCGAGGAG |
| | CTCCAGGATTCAGGGGACCAGCCGGTCCTAACGGCATTCCTGGTGAAAA |
| | AGGGCCCGCCGGTGAAAGGGGAGCTCCCGGTCCAGCAGGCCCTCGTGGA |
| | GCAGCTGGTGAGCCTGGACGTAGAGGTGTCCCAGGAGGGCCAGGTATGA |
| | GGGGTATGCCCGGGTCCCCTGGCGGTCCTGGATCGGATGGAAAACCAGG |
| | GCCACCAGGTTCGCAGGGTGAAAGCGGACGTCCAGGCCCACCCGGCCCT |
| | TCAGGTCCAAGGGGTCAGCCTGGTGTCATGGGTTTCCCCGGTCCAAAGGG |
| | TAATGACGGAGCACCGGGTAAAAATGGTGAACGTGGTGGCCCAGGTGGT |
| | CCAGGACCCCAAGGTCCACCAGGAAAAAACGGTGAGACAGGTCCTCAAG |
| | GACCTCCAGGACCTACCGGTCCTGGAGGAGATAAGGGAGATACGGGACC |
| | GCCAGGACCTCAAGGATTGCAAGGTTTGCCTGGTACAGGAGGCCCTCCC |
| | GGAGAAAATGGTAAGCCTGGAGAGCCAGGACCAAAAGGCGATGCTGGA |
| | GCCCCAGGTGCACCCGGAGGTAAGGGAGACGCCGGTGCTCCGGGTGAGC |
| | GTGGTCCTCCGGCAATTGCTGGTATTGGTGGAGAAAAGGCCGGCGGTTTC |
| | GCTCCATATTATGGT |
| 1035 | GACGTCAAATCTGGTGTTGCTGTTGGAGGTTTAGCAGGCTACCCTGGTCC |
| | CGCAGGGCCCCCAGGTCCGCCGGGTCCGCCCGGAACATCAGGTCATCCC |
| | GGAAGCCCTGGTTCACCAGGTTATCAGGGACCGCCCGGAGAGCCTGGAC |
| | AAGCTGGTCCCTCCGGACCCCCTGGTCCACCAGGTGCTATTGGACCAAGT |
| | GGTCCTGCCGGAAAAAGAGGTGAATCCGGTAGACCTGGTAGACCCGGCG |
| | AAAGGGGTTTACCAGGTCCTCCCGGAATTAAGGGTCCAGCCGGTATACCC |
| | GGTTTTCCTGGGATGAAGGGTCACAGAGGATTTAGAGGTAGAAACGGAG |
| | AGAAAGGCAGAACCGGTGCTCCCGGACTGAAGGGTGAAAACGGTCTTCC |
| | TGGTGAGAACGGCGCTCCTGGACCTATGGGTCCACGTGGTGCTCCAGGA |
| | GAAAGAGGCAGACCAGGATTGCCTGGTGCAGCTGGTGCTAGAGGTAACA |
| | GAGGTGCCCGTGGTTCCAGAGGACAACCCGGGCCACCCGGCCCTCCAGG |
| | TACCGCTGGATTTCCTGGAAGCCCTGGTGCTAAGGGGAGAGTTGGTCCGG |
| | CTGGTAGTCCCGGAAGTAACGGTGCCCCAGGTCAAAGAGGCAGACCAGG |
| | CCCTCAGGGTCACGCAGGAGCACAGGGACCGCCTGGTCCTCCTGGTATTA |
| | ATGGTTCGCCTGGAGGAAAAGGTAGAATGGGGCCCGCAGGAATCCCCGG |
| | TGCGCCTGGTCTTATGGGTGCCAGGGGTCCTCCAGGCCCGGCCGGTGCAA |
| | ATGGTGCTCCCGGATTACGAGGAGGAGCTGGTAGACCTGGTAAAAACGG |
| | TGCCAAAGGAAGACCAGGTCCTCGTGGAGAGCGTGGTAGAGCTGGCATT |
| | CCCGGTGTGCCTGGTGCAAAAGGTAGACGTGGTAAGAGAGGTTCCCCTG |
| | GTGAGCCAGGTGCGAACGGACTGCCAGGTGCAGCCGGAGAGCGAGGAG |
| | CTCCAGGATTCAGGGGACCAGCCGGTCCTAACGGCATTCCTGGTGAAAA |
| | AGGGCCCGCCGGTGAAAGGGGAGCTCCCGGTCCAGCAGGCCCTCGTGGA |
| | GCAGCTGGTAGACCTGGACGTAGAGGTGTCCCAGGAGGGCCAGGTATGA |
| | GGGGTATGCCCGGGTCCCCTGGCGGTCCTGGATCGAGAGGAAAACCAGG |
| | GCCACCAGGTTCGCAGGGTGAAAGCGGACGTCCAGGCCCACCCGGCCCT |
| | TCAGGTCCAAGGGGTCAGCCTGGTGTCATGGGTTTCCCCGGTCCAAAGGG |
| | TAATAGAGGAGCACCGGGTAAAAATGGTAGACGTGGTGGCCCAGGTGGT |
| | CCAGGACCCCAAGGTCCACCAGGAAAAAACGGTGAGACAGGTCCTCAAG |
| | GACCTCCAGGACCTACCGGTCCTGGAGGAAGAAAGGGAAGAACGGGACC |
| | GCCAGGACCTCAAGGATTGCAAGGTTTGCCTGGTACAGGAGGCCCTCCC |
| | GGAGAAAATGGTAAGCCTGGAAGACCAGGACCAAAAGGCGATGCTGGA |
| | GCCCCAGGTGCACCCGGAGGTAAGGGACGTGCCGGTGCTCCGGGTGAGC |
| | GTGGTCCTCCGGCAATTGCTGGTATTGGTGGAGAAAAGGCCGGCGGTTTC |
| | GCTCCATATTATGGT |
| 1036 | GACGTCAAATCTGGTGTTGCTGTTGGAGGTATGGGTGGCTACCCTGGTCC |
| | CGCAGGGCCCCCAGGTCCGCCGGGTCCGCCCGGAGTTTCAGGTCATCCCG |
| | GAGCACCTGGTGCACCAGGTTATCAGGGACCGCCCGGAGAGCCTGGACA |
| | AGCTGGTCCCGCAGGACCCCCTGGTCCACCAGGTGCTATGGGACCAGCA |
| | GGTCCTGCCGGAAAAGACGGTGAATCCGGTAGACCTGGTAGACCCGGCG |
| | AAAGGGGTTTTCCAGGTCCTCCCGGAATTAAGGGTCCAGCCGGTATGCCC |
| | GGTTTTCCTGGGATGAAGGGTCACAGAGGATTTGATGGTAGAAACGGAG |
| | AGAAAGGCGATACCGGTGCTCCCGGACTGAAGGGTGAAAACGGTCTTCC |
| | TGGTGAGAACGGCGCTCCTGGACCTATGGGTCCACGTGGTGCTCCAGGA |
| | GAAAGAGGCAGACCAGGATTGCCTGGTGCAGCTGGTGCTAGAGGTAACG |
| | ATGGTGCCCGTGGTTCCGATGGACAACCCGGGCCACCCGGCCCTCCAGGT |
| | ACCGCTGGATTTCCTGGAAGCCCTGGTGCTAAGGGGGAGGTTGGTCCGGC |
| | TGGTGCTCCCGGACCAAACGGTGCCCCAGGTCAAAGAGGCGAACCAGGC |
| | CTTCAGGGTCAGGCAGGAGCACCGGGACCGCCTGGTCCTCCTGGTATTAA |
| | TGGTTCGCCTGGAGGAAAAGGTGAAATGGGGCCCGCAGGAATCCCCGGT |
| | GCGCCTGGTCTTATCGGTGCCAGGGGTCCTCCAGGCCCGCCGGGTGCAAA |
| | TGGTGTGCCCGGACAGCGAGGAGCTGCTGGTGAACCTGGTAAAAACGGT |
| | GCCAAAGGAGACCCAGGTGCTCGTGGAGAGCGTGGTGAAGCTGGCATTC |
| | CCGGTATTGCAGGTCCCAAAGGTGAGGACGGTAAGGACGGTTCCCCTGG |
| | TGAGCCAGGTGCGAACGGACTGCCAGGTGCACCAGGAGAGCGAGGACCA |
| | CCAGGATTCAGGGGAGCCCCTGGTGCTAACGGCATTCCTGGTGAAAAAG |
| | GGCCCCCAGGTGAAAGGGGAGGACCCGGTCCAGCAGGCCCTCGTGGAGT |
| | CGCTGGTGAGCCTGGACGTGACGGTTTGCCAGGAGGGCCAGGTTTGAGG |
| | GGTATTCCCGGGTCCCCTGGCGGTCCTGGATCGGATGGAAAACCAGGGC |
| | CACCAGGTTCGCAGGGTGAAAGCGGACGTCCAGGCCCACCCGGCTCACC |
| | TGGTCCAAGGGGTCAGCCTGGTGTCATGGGTTTCCCCGGTCCAAAGGGTA |
| | ATGACGGAGCACCGGGTAAAAATGGTGAACGTGGTGGCCCAGGTGGTCC |
| | AGGATTGCCCGGTCCAGCAGGAAAAAACGGTGAGACAGGTCCTCAAGGA |
| | CCTCCAGGACCTACCGGTCCTGCAGGAGATAAGGGAGATGCAGGACCGC |
| | CAGGACCTCCTGGATTGCAAGGTTTGCCTGGTACAGGAGGCCCTCCCGGA |
| | GAAAATGGTAAGCCTGGAGAGCCAGGACCAAAAGGCGATGTCGGAGCCC |
| | CAGGTATTCCCGGAGGTAAGGGAGACGCCGGTGCTCCGGGTGAGCGTGG |
| | TCCTCCGGCAATTGCTGGTATTGGTGGAGAAAAGGCCGGCGGTTTCGCTC |
| | CATATTATGGT |
| 1037 | GACGTCAAATCTGGTGTTGCTGTTGGAGGTTTAGCAGGCTACCCTGGTCC |
| | CGCAGGGCCCCCAGGTCCGCCGGGTCCGCCCGGAACATCAGGTCATCCC |
| | GGAAGCCCTGGTTCACCAGGTTATCAGGGACCGCCCGGAGAGCCTGGAC |
| | AAGCTGGTCCCTCCGGACCCCCTGGTCCACCAGGTGCTATTGGACCAAGT |
| | GGTCCTGCCGGAAAAGACGGTGAATCCGGTAGACCTGGTAGACCCGGCG |
| | AAAGGGGTTTACCAGGTCCTCCCGGAATTAAGGGTCCAGCCGGTATACCC |
| | GGTTTTCCTGGGATGAAGGGTCACAGAGGATTTGATGGTAGAAACGGAG |
| | AGAAAGGCGAAACCGGTGCTCCCGGACTGAAGGGTGAAAACGGTCTTCC |
| | TGGTGAGAACGGCGCTCCTGGACCTATGGGTCCACGTGGTGCTCCAGGA |
| | GAAAGAGGCAGACCAGGATTGCCTGGTGCAGCTGGTGCTAGAGGTAACG |
| | ATGGTGCCCGTGGTTCCGATGGACAACCCGGGCCACCCGGCCCTCCAGGT |
| | ACCGCTGGATTTCCTGGAAGCCCTGGTGCTAAGGGGGAGGTTGGTCCGGC |
| | TGGTAGTCCCGGAAGTAACGGTGCCCCAGGTCAAAGAGGCGAACCAGGC |
| | CCTCAGGGTCACGCAGGAGCACAGGGACCGCCTGGTCCTCCTGGTATTAA |
| | TGGTTCGCCTGGAGGAAAAGGTGAAATGGGGCCCGCAGGAATCCCCGGT |
| | GCGCCTGGTCTTATGGGTGCCAGGGGTCCTCCAGGCCCGGCCGGTGCAAA |
| | TGGTGCTCCCGGATTACGAGGAGGAGCTGGTGAACCTGGTAAAAACGGT |
| | GCCAAAGGAGAACCAGGTCCTCGTGGAGAGCGTGGTGAAGCTGGCATTC |
| | CCGGTGTGCCTGGTGCAAAAGGTGAGGACGGTAAGGACGGTTCCCCTGG |
| | TGAGCCAGGTGCGAACGGACTGCCAGGTGCAGCCGGAGAGCGAGGAGCT |
| | CCAGGATTCAGGGGACCAGCCGGTCCTAACGGCGTGGCAGGTCCTAAAG |
| | GGCCCGCCGGTGAAAGGGGAGCTCCCGGTCCAGCAGGCCCTAAAGGAGC |
| | AGCTGGTGAGGCAGGACGTCCCGGTGAAGCAGGACTGCCAGGTGCAAAA |
| | GGTATGCCCGGGTCCCCTGGCGGTCCTGGACCTGATGGAAAACCAGGGC |
| | CACCAGGTCCAGCAGGTCAGGATGGACGTCCAGGCCCACCCGGCCCTCC |
| | GGGTGCAAGGGGTCAGGCAGGTGTCATGGGTTTCCCCGGTCCAAAGGGT |
| | GCAGCAGGAGAACCGGGTAAAGCAGGTGAACGTGGTGTCCCAGGTCCGC |
| | CAGGAGCAGTCGGTCCAGCAGGAAAAGATGGTGAGGCAGGTGCACAAG |
| | GACCTCCAGGACCTGCAGGTCCTGCAGGAGAGAGGGGAGAGCAGGGACC |
| | GGCAGGACCTCAAGGATTTCAAGGTTTGCCTGGTCCTGCAGGCCCTCCCG |
| | GAGAAGCAGGTAAGCCTGGAGAGCAAGGAGTCCCCGGCGATTTGGGAGC |
| | CCCAGGTGCACCCGGAGCAAGGGGAGAGAGGGGTGCTCCGGGTGAGCGT |
| | GGTCCTCCGGCAATTGCTGGTATTGGTGGAGAAAAGGCCGGCGGTTTCGC |
| | TCCATATTATGGT |
| 1038 | GACGTCAAATCTGGTGTTGCTGTCGGAGGTTTAGCAGGCTACCCTGGTCC |
| | CGCAGGGCCCCCAGGTCCGCCGGGTCCGCCCGGAACATCAGGTCATCCC |
| | GGAAGCCCTGGTTCACCAGGTTATCAGGGACCGCCCGGAGAGCCTGGAC |
| | AAGCTGGTCCCTCCGGACCCCCTGGTCCACCAGGTGCTATTGGACCAAGT |
| | GGTCCTGCCGGAAAAGACGGTGAATCCGGTAGACCTGGTAGACCCGGCG |
| | AAAGGGGTTTACCAGGTCCTCCCGGAATTAAGGGTCCAGCCGGTATACCC |
| | GGTTTTCCTGGGATGAAGGGTCACAGAGGATTTGATGGTAGAAACGGAG |
| | AGAAAGGCGAAACCGGTGCTCCCGGACTGAAGGGTGAAAACGGTCTTCC |
| | TGGTGAGAACGGCGCTCCTGGACCTATGGGTCCACGTGGTGCTCCAGGA |
| | GAAAGAGGCAGACCAGGATTGCCTGGTGCAGCTGGTGCTAGAGGTAACG |
| | ATGGTGCCCGTGGTTCCGATGGACAACCCGGGCCACCCGGCCCTCCAGGT |
| | ACCGCTGGATTTCCTGGAAGCCCTGGTGCTAAGGGGGAGGTTGGTCCGGC |
| | TGGTAGTCCCGGAAGTAACGGTGCCCCAGGTCAAAGAGGCGAACCAGGC |
| | CCTCAGGGTCACGCAGGAGCACAGGGACCGCCTGGTCCTCCTGGTATTAA |
| | TGGTTCGCCTGGAGGAAAAGGTGAAATGGGGCCCGCAGGAATCCCCGGT |
| | GCGCCTGGTCTTATGGGTGCCAGGGGTCCTCCAGGCCCGGCCGGTGCAAA |
| | TGGTGCTCCCGGATTACGAGGAGGAGCTGGTGAACCTGGTAAAAACGGT |
| | GCCAAAGGAGAACCAGGTCCTCGTGGAGAGCGTGGTGAAGCTGGCATTC |
| | CCGGTGTGCCTGGTGCAAAAGGTGAGGACGGTAAGGACGGTTCCCCTGG |
| | TGAGCCAGGTGCGAACGGACTGCCAGGTGCAGCCGGAGAGCGAGGAGCT |
| | CCAGGATTCAGGGGACCAGCCGGTCCTAACGGCATTCCTGGTGAAAAAG |
| | GGCCCGCCGGTGAAAGGGGAGCTCCCGGTCCAGCAGGCCCTCGTGGAGC |
| | AGCTGGTGAGCCTGGACGTGACGGTGTCCCAGGAGGGCCAGGTATGAGG |
| | GGTATGCCCGGGTCCCCTGGCGGTCCTGGATCGGATGGAAAACCAGGGC |
| | CACCAGGTTCGCAGGGTGAAAGCGGACGTCCAGGCCCACCCGGCCCTTC |
| | AGGTCCAAGGGGTCAGCCTGGTGTCATGGGTTTCCCCGGTCCAAAGGGTA |
| | ATGACGGAGCACCGGGTAAAAATGGTGAACGTGGTGGCCCAGGTGGTCC |
| | AGGACCCCAAGGTCCACCAGGAAAAAACGGTGAGACAGGTCCTCAAGGA |
| | CCTCCAGGACCTACCGGTCCTGGAGGAGATAAGGGAGATACGGGACCGC |
| | CAGGACCTCAAGGATTGCAAGGTTTGCCTGGTACAGGAGGCCCTCCCGG |
| | AGAAAATGGTAAGCCTGGAGAGCCAGGACCAAAAGGCGATGCTGGAGC |
| | CCCAGGTGCACCCGGAGGTAAGGGAGACGCCGGTGCTCCGGGTGAGCGT |
| | GGTCCTCCG |
| 1039 | GACGTCAAATCTGGTGTTGCTGTTGGAAAAACAACAAAATCAGGTTTAGC |
| | AGGCTACCCTGGTCCCGCAGGGCCCCCAGGTCCGCCGGGTCCGCCCGGA |
| | ACATCAGGTCATCCCGGAAGCCCTGGTTCACCAGGTTATCAGGGACCGCC |
| | CGGAGAGCCTGGACAAGCTGGTCCCTCCGGACCCCCTGGTCCACCAGGT |
| | GCTATTGGACCAAGTGGTCCTGCCGGAAAAGACGGTGAATCCGGTAGAC |
| | CTGGTAGACCCGGCGAAAGGGGTTTACCAGGTCCTCCCGGAATTAAGGG |
| | TCCAGCCGGTATACCCGGTTTTCCTGGGATGAAGGGTCACAGAGGATTTG |
| | ATGGTAGAAACGGAGAGAAAGGCGAAACCGGTGCTCCCGGACTGAAGG |
| | GTGAAAACGGTCTTCCTGGTGAGAACGGCGCTCCTGGACCTATGGGTCCA |
| | CGTGGTGCTCCAGGAGAAAGAGGCAGACCAGGATTGCCTGGTGCAGCTG |
| | GTGCTAGAGGTAACGATGGTGCCCGTGGTTCCGATGGACAACCCGGGCC |
| | ACCCGGCCCTCCAGGTACCGCTGGATTTCCTGGAAGCCCTGGTGCTAAGG |
| | GGGAGGTTGGTCCGGCTGGTAGTCCCGGAAGTAACGGTGCCCCAGGTCA |
| | AAGAGGCGAACCAGGCCCTCAGGGTCACGCAGGAGCACAGGGACCGCCT |
| | GGTCCTCCTGGTATTAATGGTTCGCCTGGAGGAAAAGGTGAAATGGGGC |
| | CCGCAGGAATCCCCGGTGCGCCTGGTCTTATGGGTGCCAGGGGTCCTCCA |
| | GGCCCGGCCGGTGCAAATGGTGCTCCCGGATTACGAGGAGGAGCTGGTG |
| | AACCTGGTAAAAACGGTGCCAAAGGAGAACCAGGTCCTCGTGGAGAGCG |
| | TGGTGAAGCTGGCATTCCCGGTGTGCCTGGTGCAAAAGGTGAGGACGGT |
| | AAGGACGGTTCCCCTGGTGAGCCAGGTGCGAACGGACTGCCAGGTGCAG |
| | CCGGAGAGCGAGGAGCTCCAGGATTCAGGGGACCAGCCGGTCCTAACGG |
| | CATTCCTGGTGAAAAAGGGCCCGCCGGTGAAAGGGGAGCTCCCGGTCCA |
| | GCAGGCCCTCGTGGAGCAGCTGGTGAGCCTGGACGTGACGGTGTCCCAG |
| | GAGGGCCAGGTATGAGGGGTATGCCCGGGTCCCCTGGCGGTCCTGGATC |
| | GGATGGAAAACCAGGGCCACCAGGTTCGCAGGGTGAAAGCGGACGTCCA |
| | GGCCCACCCGGCCCTTCAGGTCCAAGGGGTCAGCCTGGTGTCATGGGTTT |
| | CCCCGGTCCAAAGGGTAATGACGGAGCACCGGGTAAAAATGGTGAACGT |
| | GGTGGCCCAGGTGGTCCAGGACCCCAAGGTCCACCAGGAAAAAACGGTG |
| | AGACAGGTCCTCAAGGACCTCCAGGACCTACCGGTCCTGGAGGAGATAA |
| | GGGAGATACGGGACCGCCAGGACCTCAAGGATTGCAAGGTTTGCCTGGT |
| | ACAGGAGGCCCTCCCGGAGAAAATGGTAAGCCTGGAGAGCCAGGACCAA |
| | AAGGCGATGCTGGAGCCCCAGGTGCACCCGGAGGTAAGGGAGACGCCGG |
| | TGCTCCGGGTGAGCGTGGTCCTCCGAAAACAACAAAATCAGCAATTGCT |
| | GGTATTGGTGGAGAAAAGGCCGGCGGTTTCGCTCCATATTATGGT |
| 1040 | GACGTCAAATCTGGTGTTGCTGTTGGAAAAACAACAAAATCAGGTTTAGC |
| | AGGCTACCCTGGTCCCGCAGGGCCCCCAGGTCCGCCGGGTCCGCCCGGA |
| | ACATCAGGTCATCCCGGAAGCCCTGGTTCACCAGGTTATCAGGGACCGCC |
| | CGGAGAGCCTGGACAAGCTGGTCCCTCCGGACCCCCTGGTCCACCAGGT |
| | GCTATTGGACCAAGTGGTCCTGCCGGAAAAGACGGTGAATCCGGTAGAC |
| | CTGGTAGACCCGGCGAAAGGGGTTTACCAGGTCCTCCCGGAATTAAGGG |
| | TCCAGCCGGTATACCCGGTTTTCCTGGGATGAAGGGTCACAGAGGATTTG |
| | ATGGTAGAAACGGAGAGAAAGGCGAAACCGGTGCTCCCGGACTGAAGG |
| | GTGAAAACGGTCTTCCTGGTGAGAACGGCGCTCCTGGACCTATGGGTCCA |
| | CGTGGTGCTCCAGGAGAAAGAGGCAGACCAGGATTGCCTGGTGCAGCTG |
| | GTGCTAGAGGTAACGATGGTGCCCGTGGTTCCGATGGACAACCCGGGCC |
| | ACCCGGCCCTCCAGGTACCGCTGGATTTCCTGGAAGCCCTGGTGCTAAGG |
| | GGGAGGTTGGTCCGGCTGGTAGTCCCGGAAGTAACGGTGCCCCAGGTCA |
| | AAGAGGCGAACCAGGCCCTCAGGGTCACGCAGGAGCACAGGGACCGCCT |
| | GGTCCTCCTGGTATTAATGGTTCGCCTGGAGGAAAAGGTGAAATGGGGC |
| | CCGCAGGAATCCCCGGTGCGCCTGGTCTTATGGGTGCCAGGGGTCCTCCA |
| | GGCCCGGCCGGTGCAAATGGTGCTCCCGGATTACGAGGAGGAGCTGGTG |
| | AACCTGGTAAAAACGGTGCCAAAGGAGAACCAGGTCCTCGTGGAGAGCG |
| | TGGTGAAGCTGGCATTCCCGGTGTGCCTGGTGCAAAAGGTGAGGACGGT |
| | AAGGACGGTTCCCCTGGTGAGCCAGGTGCGAACGGACTGCCAGGTGCAG |
| | CCGGAGAGCGAGGAGCTCCAGGATTCAGGGGACCAGCCGGTCCTAACGG |
| | CATTCCTGGTGAAAAAGGGCCCGCCGGTGAAAGGGGAGCTCCCGGTCCA |
| | GCAGGCCCTCGTGGAGCAGCTGGTGAGCCTGGACGTGACGGTGTCCCAG |
| | GAGGGCCAGGTATGAGGGGTATGCCCGGGTCCCCTGGCGGTCCTGGATC |
| | GGATGGAAAACCAGGGCCACCAGGTTCGCAGGGTGAAAGCGGACGTCCA |
| | GGCCCACCCGGCCCTTCAGGTCCAAGGGGTCAGCCTGGTGTCATGGGTTT |
| | CCCCGGTCCAAAGGGTAATGACGGAGCACCGGGTAAAAATGGTGAACGT |
| | GGTGGCCCAGGTGGTCCAGGACCCCAAGGTCCACCAGGAAAAAACGGTG |
| | AGACAGGTCCTCAAGGACCTCCAGGACCTACCGGTCCTGGAGGAGATAA |
| | GGGAGATACGGGACCGCCAGGACCTCAAGGATTGCAAGGTTTGCCTGGT |
| | ACAGGAGGCCCTCCCGGAGAAAATGGTAAGCCTGGAGAGCCAGGACCAA |
| | AAGGCGATGCTGGAGCCCCAGGTGCACCCGGAGGTAAGGGAGACGCCGG |
| | TGCTCCGGGTGAGCGTGGTCCTCCGAAAACAACAAAATCAGCAATTGCT |
| | GGTATTGGTGGAGAAAAGGCCGGCGGTTTCGCTCCATATTATGGT |
| 1041 | GACGTCAAATCTGGTGTTGCTGTTGGAAAAACAACAAAATCAGGTTTAGC |
| | AGGCTACCCTGGTCCCGCAGGGCCCCCAGGTCCGCCGGGTCCGCCCGGA |
| | ACATCAGGTCATCCCGGAAGCCCTGGTTCACCAGGTTATCAGGGACCGCC |
| | CGGAGAGCCTGGACAAGCTGGTCCCTCCGGACCCCCTGGTCCACCAGGT |
| | GCTATTGGACCAAGTGGTCCTGCCGGAAAAGACGGTGAATCCGGTAGAC |
| | CTGGTAGACCCGGCGCCGCTGGTTTACCAGGTCCTCCCGGAATTAAGGGT |
| | CCAGCCGGTATACCCGGTTTTCCTGGGATGAAGGGTCACAGAGGATTTGA |
| | TGGTAGAAACGGAGAGAAAGGCGAAACCGGTGCTCCCGGACTGAAGGGT |
| | GAAAACGGTCTTCCTGGTGCCGCTGGCGCTCCTGGACCTATGGGTCCACG |
| | TGGTGCTCCAGGAGCCGCTGGCAGACCAGGATTGCCTGGTGCAGCTGGT |
| | GCTAGAGGTAACGATGGTGCCCGTGGTTCCGATGGACAACCCGGGCCAC |
| | CCGGCCCTCCAGGTACCGCTGGATTTCCTGGAAGCCCTGGTGCTAAGGGG |
| | GAGGTTGGTCCGGCTGGTAGTCCCGGAAGTAACGGTGCCCCAGGTCAAA |
| | GAGGCGAACCAGGCCCTCAGGGTCACGCAGGAGCACAGGGACCGCCTGG |
| | TCCTCCTGGTATTAATGGTTCGCCTGGAGGAAAAGGTGAAATGGGGCCCG |
| | CAGGAATCCCCGGTGCGCCTGGTCTTATGGGTGCCAGGGGTCCTCCAGGC |
| | CCGGCCGGTGCAAATGGTGCTCCCGGATTACGAGGAGGAGCTGGTGAAC |
| | CTGGTAAAAACGGTGCCAAAGGAGAACCAGGTCCTCGTGGAGAGCGTGG |
| | TGAAGCTGGCATTCCCGGTGTGCCTGGTGCAAAAGGTGAGGACGGTAAG |
| | GACGGTTCCCCTGGTGAGCCAGGTGCGAACGGACTGCCAGGTGCAGCCG |
| | GAGAGCGAGGAGCTCCAGGATTCAGGGGACCAGCCGGTCCTAACGGCAT |
| | TCCTGGTGAAAAAGGGCCCGCCGGTGAAAGGGGAGCTCCCGGTCCAGCA |
| | GGCCCTCGTGGAGCAGCTGGTGAGCCTGGACGTGACGGTGTCCCAGGAG |
| | GGCCAGGTATGAGGGGTATGCCCGGGTCCCCTGGCGGTCCTGGATCGGA |
| | TGGAAAACCAGGGCCACCAGGTTCGCAGGGTGAAAGCGGACGTCCAGGC |
| | CCACCCGGCCCTTCAGGTCCAAGGGGTCAGCCTGGTGTCATGGGTTTCCC |
| | CGGTCCAAAGGGTAATGACGGAGCACCGGGTAAAAATGGTGAACGTGGT |
| | GGCCCAGGTGGTCCAGGACCCCAAGGTCCACCAGGAAAAAACGGTGAGA |
| | CAGGTCCTCAAGGACCTCCAGGACCTACCGGTCCTGGAGGAGATAAGGG |
| | AGATACGGGACCGCCAGGACCTCAAGGATTGCAAGGTTTGCCTGGTACA |
| | GGAGGCCCTCCCGGAGAAAATGGTAAGCCTGGAGAGCCAGGACCAAAA |
| | GGCGATGCTGGAGCCCCAGGTGCACCCGGAGGTAAGGGAGACGCCGGTG |
| | CTCCGGGTGCCGCTGGTCCTCCGAAAACAACAAAATCAGCAATTGCTGGT |
| | ATTGGTGGAGAAAAGGCCGGCGGTTTCGCTCCATATTATGGT |
| 1042 | GACGTCAAATCTGGTGTTGCTGTTGGAGGTTTAGCAGGCTACCCTGGTCC |
| | CGCAGGGCCCCCAGGTCCGCCGGGTCCGCCCGGAACATCAGGTCATCCC |
| | GGAAGCCCTGGTTCACCAGGTTATCAGGGACCGCCCGGAGAGCCTGGAC |
| | AAGCTGGTCCCTCCGGACCCCCTGGTCCACCAGGTGCTATTGGACCAAGT |
| | GGTCCTGCCGGAAAAGACGGTGAATCCGGTAGACCTGGTAGACCCGGCG |
| | AAAGGGGTTTACCAGGTCCTCCCGGAATTAAGGGTCCAGCCGGTATACCC |
| | GGTTTTCCTGGGATGAAGGGTCACAGAGGATTTGATGGTAGAAACGGAG |
| | AGAAAGGCGAAACCGGTGCTCCCGGACTGAAGGGTGAAAACGGTCTTCC |
| | TGGTGAGAACGGCGCTCCTGGACCTATGGGTCCACGTGGTGCTCCAGGA |
| | GAAAGAGGCAGACCAGGATTGCCTGGTGCAGCTGGTGCTAGAGGTAACG |
| | ATGGTGCCCGTGGTTCCGATGGACAACCCGGGCCACCCGGCCCTCCAGGT |
| | ACCGCTGGATTTCCTGGAAGCCCTGGTGCTAAGGGGGAGGTTGGTCCGGC |
| | TGGTAGTCCCGGAAGTAACGGTGCCCCAGGTCAAAGAGGCGAACCAGGC |
| | CCTCAGGGTCACGCAGGAGCACAGGGACCGCCTGGTCCTCCTGGTATTAA |
| | TGGTTCGCCTGGAGGAAAAGGTGAAATGGGGCCCGCAGGAATCCCCGGT |
| | GCGCCTGGTCTTATGGGTGCCAGGGGTCCTCCAGGCCCGGCCGGTGCAAA |
| | TGGTGCTCCCGGATTACGAGGAGGAGCTGGTGAACCTGGTAAAAACGGT |
| | GCCAAAGGAGAACCAGGTCCTCGTGGAGAGCGTGGTGAAGCTGGCATTC |
| | CCGGTGTGCCTGGTGCAAAAGGTGAGGAGGGTAAGCGAGGTGCACGAGG |
| | TGAGGCAGGTTCGGCGGGACCTCCAGGTCCTCCAGGATTACGAGGAGCT |
| | CCAGGATTCAGGGGATTACCAGGTGCAGATGGCAGGGCAGGTGTGATGG |
| | GGCCCCCTGGTGAAAGGGGAGCTCCCGGTCCAGCAGGCGTGCGTGGAGC |
| | AGCTGGTGATGCAGGACGTCCTGGTGAACCAGGATTAATGGGTCCTAGG |
| | GGTTTACCCGGGTCCCCTGGCGGTCCTGGACCTGCAGGAAAAGAAGGGC |
| | CAGTGGGTTTACCTGGTATTGATGGACGTCCAGGCCCAATTGGCCCTGCA |
| | GGTGCAAGGGGTGAACCTGGTGTCATGGGTTTCCCCGGTCCAAAGGGTA |
| | ATGACGGAGATCCGGGTAAAAATGGTGACAAAGGTCACGCAGGTTTAGC |
| | AGGAGCAAGGGGTGCACCAGGACCCGATGGTGAGACAGGTCCTCAAGGA |
| | CCTCCAGGACCTACCGGTCCTGGAGGAGATAAGGGAGATACGGGACCGC |
| | CAGGACCTCAAGGATTGCAAGGTTTGCCTGGTACAGGAGGCCCTCCCGG |
| | AGAAAATGGTAAGCCTGGAGAGCCAGGACCAAAAGGCGATGCTGGAGC |
| | CCCAGGTGCACCCGGAGGTAAGGGAGACGCCGGTGCTCCGGGTGAGCGT |
| | GGTCCTCCGGCAATTGCTGGTATTGGTGGAGAAAAGGCCGGCGGTTTCGC |
| | TCCATATTATGGT |
| 1043 | GACGTCAAATCTGGTGTTGCTGTTGGAGGTATGGGTGGCTACCCTGGTCC |
| | CGCAGGGCCCCCAGGTCCGCCGGGTCCGCCCGGAGTTTCAGGTCATCCCG |
| | GAGCACCTGGTGCACCAGGTTATCAGGGACCGCCCGGAGAGCCTGGACA |
| | AGCTGGTCCCGCAGGACCCCCTGGTCCACCAGGTGCTATGGGACCAGCA |
| | GGTCCTGCCGGAAAAGACGGTGAATCCGGTAGACCTGGTAGACCCGGCG |
| | AAAGGGGTTTTCCAGGTCCTCCCGGAATTAAGGGTCCAGCCGGTATGCCC |
| | GGTTTTCCTGGGATGAAGGGTCACAGAGGATTTGATGGTAGAAACGGAG |
| | AGAAAGGCGATACCGGTGCTCCCGGACTGAAGGGTGAAAACGGTCTTCC |
| | TGGTGAGAACGGCGCTCCTGGACCTATGGGTCCACGTGGTGCTCCAGGA |
| | GAAAGAGGCAGACCAGGATTGCCTGGTGCAGCTGGTGCTAGAGGTAACG |
| | ATGGTGCCCGTGGTTCCGATGGACAACCCGGGCCACCCGGCCCTCCAGGT |
| | ACCGCTGGATTTCCTGGAAGCCCTGGTGCTAAGGGGGAGGTTGGTCCGGC |
| | TGGTGCTCCCGGACCAAACGGTGCCCCAGGTCAAAGAGGCGAACCAGGC |
| | CTTCAGGGTCAGGCAGGAGCACCGGGACCGCCTGGTCCTCCTGGTATTAA |
| | TGGTTCGCCTGGAGGAAAAGGTGAAATGGGGCCCGCAGGAATCCCCGGT |
| | GCGCCTGGTCTTATCGGTGCCAGGGGTCCTCCAGGCCCGCCGGGTGCAAA |
| | TGGTGTGCCCGGACAGCGAGGAGCTGCTGGTGAACCTGGTAAAAACGGT |
| | GCCAAAGGAGACCCAGGTGCTCGTGGAGAGCGTGGTGAAGCTGGCATTC |
| | CCGGTATTGCAGGTCCCAAAGGTGAGGACGGTAAGGACGGTTCCCCTGG |
| | TGAGCCAGGTGCGAACGGACTGCCAGGTGCACCAGGAGAGCGAGGACCA |
| | CCAGGATTCAGGGGAGCCCCTGGTGCTAACGGCATTCCTGGTGAAAAAG |
| | GGCCCCCAGGTGAAAGGGGAGGACCCGGTCCAGCAGGCCCTCGTGGAGT |
| | CGCTGGTGAGCCTGGACGTGACGGTTTGCCAGGAGGGCCAGGTTTGAGG |
| | GGTATTCCCGGGTCCCCTGGCGGTCCTGGATCGGATGGAAAACCAGGGC |
| | CACCAGGTTCGCAGGGTGAAAGCGGACGTCCAGGCCCACCCGGCTCACC |
| | TGGTCCAAGGGGTCAGCCTGGTGTCATGGGTTTCCCCGGTCCAAAGGGTA |
| | ATGACGGAGCACCGGGTAAAAATGGTGAACGTGGTGGCCCAGGTGGTCC |
| | AGGATTGCCCGGTCCAGCAGGAAAAAACGGTGAGACAGGTCCTCAAGGA |
| | CCTCCAGGACCTACCGGTCCTGCAGGAGATAAGGGAGATGCAGGACCGC |
| | CAGGACCTCCTGGATTGCAAGGTTTGCCTGGTACAGGAGGCCCTCCCGGA |
| | GAAAATGGTAAGCCTGGAGAGCCAGGACCAAAAGGCGATGTCGGAGCCC |
| | CAGGTATTCCCGGAGGTAAGGGAGACGCCGGTGCTCCGGGTGAGCGTGG |
| | TCCTCCGGCAATTGCTGGTATTGGTGGAGAAAAGGCCGGCGGTTTCGCTC |
| | CATATTATGGT |
| 1044 | GACGTCAAATCTGGTGTTGCTGTCGGAGGTTTAGCAGGCTACCCTGGTCC |
| | CGCAGGGCCCCCAGGTCCGCCGGGTCCGCCCGGAACATCAGGTCATCCC |
| | GGAAGCCCTGGTTCACCAGGTTATCAGGGACCGCCCGGAGAGCCTGGAC |
| | AAGCTGGTCCAGCTGGTCCACCAGGTCCAATTGGTAACGTTGGACCAAGT |
| | GGTCCTGCCGGAAAAGACGGTGAATCCGGTAGACCTGGTAGACCCGGCG |
| | AAAGGGGTTTACCAGGTCCTCCCGGAATTAAGGGTCCAGCCGGTATACCC |
| | GGTTTTCCTGGGATGAAGGGTCACAGAGGATTTGATGGTAGAAACGGAG |
| | AGAAAGGCGAAACCGGTGCTCCCGGACTGAAGGGTGAAAACGGTCTTCC |
| | TGGTGAGAACGGCGCTCCTGGACCTATGGGTCCACGTGGTGCTCCAGGA |
| | GAAAGAGGCAGACCAGGATTGCCTGGTGCAGCTGGTGCTAGAGGTAACG |
| | ATGGTGCCCGTGGTTCCGATGGACAACCCGGGCCACCCGGCCCTCCAGGT |
| | ACCGCTGGATTTCCTGGAAGCCCTGGTGCTAAGGGGGAGGTTGGTCCGGC |
| | TGGTAGTCCCGGAAGTAACGGTGCCCCAGGTCAAAGAGGCGAACCAGGC |
| | CCTCAGGGTCACGCAGGAGCACAGGGACCGCCTGGTCCTCCTGGTATTAA |
| | TGGTTCGCCTGGAGGAAAAGGTGAAATGGGGCCCGCAGGAATCCCCGGT |
| | GCGCCTGGTCTTATGGGTGCCAGGGGTCCTCCAGGCCCGGCCGGTGCAAA |
| | TGGTGCTCCCGGATTACGAGGAGGAGCTGGTGAACCTGGTAAAAACGGT |
| | GCCAAAGGAGAACCAGGTCCTCGTGGAGAGCGTGGTGAAGCTGGCATTC |
| | CCGGTGTGCCTGGTGCAAAAGGTGAGGACGGTAAGGACGGTTCCCCTGG |
| | TGAGCCAGGTGCGAACGGACTGCCAGGTGCAGCCGGAGAGCGAGGAGCT |
| | CCAGGATTCAGGGGACCAGCCGGTCCTAACGGCATTCCTGGTGAAAAAG |
| | GGCCCGCCGGTGAAAGGGGAGCTCCCGGTCCAGCAGGCCCTCGTGGAGC |
| | AGCTGGTGAGCCTGGACGTGACGGTGTCCCAGGAGGGCCAGGTATGAGG |
| | GGTATGCCCGGGTCCCCTGGCGGTCCTGGATCGGATGGAAAACCAGGGC |
| | CACCAGGTTCGCAGGGTGAAAGCGGACGTCCAGGCCCACCCGGCCCTTC |
| | AGGTCCAAGGGGTCAGCCTGGTGTCATGGGTTTCCCCGGTCCAAAGGGTA |
| | ATGACGGAGCACCGGGTAAAAATGGTGAACGTGGTGGCCCAGGTGGTCC |
| | AGGACCCCAAGGTCCACCAGGAAAAAACGGTGAGACAGGTCCTCAAGGA |
| | CCTCCAGGACCTACCGGTCCTGGAGGAGATAAGGGAGATACGGGACCGC |
| | CAGGACCTCAAGGATTGCAAGGTTTGCCTGGTACAGGAGGCCCTCCCGG |
| | AGAAAATGGTAAGCCTGGAGAGCCAGGACCAAAAGGCGATGCTGGAGC |
| | CCCAGGTGCACCCGGAGGTAAGGGAGACGCCGGTGCTCCGGGTGAGCGT |
| | GGTCCTCCGGCAATTGCTGGTATTGGTGGAGAAAAGGCCGGCGGTTTCGC |
| | TCCATATTATGGT |

### C. Compositions Comprising Collagen Fragments and Sequence Variants Thereof

[0075] In some embodiments, the present disclosure provides a composition comprising one or more recombinant collagen fragments disclosed herein, and at least one pharmaceutically acceptable or cosmetically acceptable excipient. In particular embodiments, the composition can comprise a recombinant collagen fragment according to SEQ ID NO: 1 or SEQ TD NO: 986, and at least one pharmaceutically acceptable or cosmetically acceptable excipient. In further embodiments, the composition can comprise a recombinant collagen fragment having at least about 70%, at least about 7500 at least about 80%, at least about 8500, at least about 87.5%, at least about 90%, at least about 92.5%, at least about 95%, at least about 97.5%, at least about 98%, at least about 99% or 100% sequence identity, or similarity to, SEQ ID NO: 1 or SEQ ID NO: 986, and at least one pharmaceutically acceptable or cosmetically acceptable excipient. In still further embodiments, the composition can comprise a recombinant collagen fragment having about 85%, about 86%, about 87%, about 88%, about 89%, about 90%, about 91%, about 92%, about 93%, about 94%, about 95%, about 96%, about 97%, about 98%, about 99%, or 100% identity, or similarity, to SEQ ID NO: 1 or SEQ ID NO: 986, and at least one pharmaceutically acceptable or cosmetically acceptable excipient. In still further embodiments, the composition can comprise a recombinant collagen fragment having about 85%, about 86%, about 87%, about 88%, about 89%, about 90%, about 91%, about 92%, about 93%, about 94%, about 95%, about 96%, about 97%, about 98%, about 99%, or 100% sequence identity, or similarity, to SEQ ID NO: 1 or SEQ ID NO: 986, and at least one excipient that is suitable for use in a dietary supplement, e.g., a nutritional supplement.

[0076] In some embodiments, the composition can comprise a hydrolysis product of a collagen fragment, wherein the hydrolysis product can have a sequence that is a portion of SEQ ID NO: 1 or SEQ ID NO: 986, and at least one pharmaceutically acceptable or cosmetically acceptable excipient. In some embodiments, the composition comprises a hydrolysis product with a sequence according to one or more of SEQ ID NOs: 2-972, and at least one pharmaceutically acceptable or cosmetically acceptable excipient. In some embodiments, the composition can comprise any of the hydrolysis products set forth in SEQ ID NOs: 2-972, and at least one pharmaceutically acceptable or cosmetically acceptable excipient. In some embodiments, the composition can comprise a recombinant collagen fragment having at least about 70%, at least about 75%, at least about 80%, at least about 85%, at least about 87.5%, at least about 90%, at least about 92.5%, at least about 95%, at least about 97.5%, at least about 98%, at least about 99% or 100% sequence identity, or similarity to, one of SEQ ID NOs: 2-972, and at least one pharmaceutically acceptable or cosmetically acceptable excipient.

[0077] In yet another embodiment, the composition can comprise a recombinant collagen fragment according to SEQ ID NO: 1 or SEQ ID NO: 986, a hydrolysis product having a sequence according to one of SEQ ID NOs: 2-972, and at least one pharmaceutically acceptable or cosmetically acceptable excipient. In yet a further embodiment, the composition can comprise a recombinant collagen fragment according to SEQ ID NO: 1 or SEQ ID NO: 986, a plurality of hydrolysis products having sequences, that can be the same or different, according to any of SEQ ID NOs: 2-972, and at least one pharmaceutically acceptable or cosmetically acceptable excipient. In certain embodiments, the number of hydrolysis products present in the plurality of hydrolysis products in the composition can increase with time, with temperature, pH, or as a result of other conditions that would typically cause a recombinant collagen fragment, such as a recombinant collagen fragment according to SEQ ID NO: 1 or SEQ ID NO: 986, to hydrolyze or otherwise breakdown. In other embodiments, the composition can be stabilized with one or more stabilizers so that the concentrations of the recombinant collagen fragment according to SEQ ID NO: 1 or SEQ ID NO: 986 and the concentrations each of the fragments in the plurality of fragments, remain substantially constant (i.e. vary by no more than +5% by HPLC over a given time period) or remain constant. In certain embodiments, the recombinant collagen fragment, such as a recombinant collagen fragment according to SEQ ID NO: 1 or SEQ ID NO: 986, can be hydrolyzed, such that less than about 10%, from about 10% to about 20%, from about 20% to about 30%, from about 30% to about 40%, from about 40% to about 50%, from about 50% to about 60%, from about 60% to about 70%, from about 70% to about 80%, from about 80% to about 90%, or from about 90% to about 100% of non-hydrolyzed recombinant fragment remains in the composition as measured by HPLC. In other embodiments, the composition can comprise a mixture of a recombinant collagen fragment (e.g., a recombinant collagen fragment according to SEQ ID NO: 1 or SEQ ID NO: 986) and a plurality of hydrolyzed products of that recombinant collagen fragment (e.g., a plurality of collagen fragments according to any of SEQ ID NOs: 2-972), such that the weight of the hydrolyzed products in the composition is less than about 10%, from about 10% to about 20%, from about 20% to about 30%, from about 30% to about 40%, from about 40% to about 50%, from about 50% to about 60%, from about 60% to about 70%, from about 70% to about 80%, from about 80% to about 90%, or from about 90% to about 100% of the weight of the collagen-related protein in the composition.

[0078] In some embodiments, the present disclosure provides a composition comprising one or more recombinant collagen fragment sequence variants disclosed herein, and at least one pharmaceutically acceptable or cosmetically acceptable excipient. In particular embodiments, the composition can comprise a recombinant collagen fragment sequence variant according to any one of SEQ ID NOs: 987-1015, and at least one pharmaceutically acceptable or cosmetically acceptable excipient. In further embodiments, the composition can comprise a recombinant collagen fragment sequence variant having at least about 70%, at least about 75%, at least about 80%, at least about 85%, at least about 87.5%, at least about 90%, at least about 92.5%, at least about 95%, at least about 97.5%, at least about 98%, or at least about 99% sequence identity, or similarity to SEQ ID NO: 986, and at least one pharmaceutically acceptable or cosmetically acceptable excipient. In still further embodiments, the composition can comprise a recombinant collagen fragment sequence variant having about 85%, about 86%, about 87%, about 88%, about 89%, about 90%, about 91%, about 92%, about 93%, about 94%, about 95%, about 96%, about 97%, about 98%, or about 99%, identity, or similarity, to SEQ ID NO: 986, and at least one pharmaceutically acceptable or cosmetically acceptable excipient. In still further embodiments, the composition can comprise a recombinant collagen fragment sequence variant having about 85%, about 86%, about 87%, about 88%, about 89%, about 90%, about 91%, about 92%, about 93%, about 94%, about 95%, about 96%, about 97%, about 98%, or about 99% sequence identity, or similarity SEQ ID NO: 986, and at least one excipient that is suitable for use in a dietary supplement, e.g., a nutritional supplement.

[0079] In some embodiments, the composition can comprise a recombinant collagen fragment having an amino acid chain length from about 350 amino acids to about 600 amino acids that overlaps with the amino acid sequence in SEQ ID NO: 1 or SEQ ID NO: 986. In some embodiments, the composition comprises a recombinant collagen fragment having a length of about 350 amino acids, about 370 amino acids, about 390 amino acids, about 400 amino acids, about 420 amino acids, about 440 amino acids, about 460 amino acids, about 480 amino acids, about 500 amino acids, about 510 amino acids, about 520 amino acids, about 530 amino acids, about 540 amino acids, about 550 amino acids, about 560 amino acids, about 570 amino acids, about 580 amino acids, about 590 amino acids, or about 600 amino acids. In a particular embodiment, the composition comprises a recombinant collagen fragment having an amino acid chain length of 528 amino acids. In a particular embodiment, the composition comprises a recombinant collagen fragment having an amino acid chain length of 546 amino acids.

[0080] In some embodiments, the composition can comprise a recombinant collagen fragment sequence variant according to any one of SEQ ID NOs: 987-1015, having a length of about 350 amino acids, about 370 amino acids, about 390 amino acids, about 400 amino acids, about 420 amino acids, about 440 amino acids, about 460 amino acids, about 480 amino acids, about 500 amino acids, about 510 amino acids, about 520 amino acids, about 530 amino acids, about 540 amino acids, about 550 amino acids, about 560 amino acids, about 570 amino acids, about 580 amino acids, about 590 amino acids, or about 600 amino acids. In a particular embodiment, the composition comprises a recombinant collagen fragment having an amino acid chain length of 528 amino acids. In a particular embodiment, the composition comprises a recombinant collagen fragment having an amino acid chain length of 546 amino acids.

[0081] In some embodiments, the composition can comprise a recombinant collagen fragment or sequence variant thereof having an amino acid chain length from about 350 amino acids to about 600 amino acids and can have at least about 70%, at least about 75%, at least about 80%, at least about 85%, at least about 87.5%, at least about 90%, at least about 92.5%, at least about 95%, at least about 97.5%, at least about 98%, at least about 99% or 100% sequence identity, or similarity to SEQ ID NO: 1 or SEQ ID NO: 986. In some embodiments, the such a collagen fragment described herein can have a length of about 350 amino acids, about 370 amino acids, about 390 amino acids, about 400 amino acids, about 420 amino acids, about 440 amino acids, about 460 amino acids, about 480 amino acids, about 500 amino acids, about 510 amino acids, about 520 amino acids, about 530 amino acids, about 540 amino acids, about 550 amino acids, about 560 amino acids, about 570 amino acids, about 580 amino acids, about 590 amino acids, or about 600 amino acids.

[0082] In some embodiments, the composition can comprise a hydrolysis product of a collagen fragment, wherein the hydrolysis product can have an amino acid chain length from about 10 amino acids to about 75 amino acids. In some embodiments, the composition can comprise a hydrolysis product of a collagen fragment having an amino acid chain length from about 20 amino acids to about 50 amino acids. In some embodiments, the hydrolysis product described herein can have a length of about 10 amino acids, about 15 amino acids, about 20 amino acids, about 25 amino acids, about 30 amino acids, about 35 amino acids, about 40 amino acids, about 45 amino acids, about 50 amino acids, about 55 amino acids, about 60 amino acids, about 65 amino acids, about 70 amino acids, or about 75 amino acids.

[0083] In some embodiments the composition can comprise from about 5 ppm to about 500 ppm of a recombinant collagen fragment or sequence variant thereof. In some embodiments, the composition can comprise about 5 ppm, about 10 ppm, about 25 ppm, about 50 ppm, about 100 ppm, about 150 ppm, about 200 ppm, about 250 ppm, about 300 ppm, about 350 ppm, about 350 ppm, about 400 ppm, about 450 ppm, or about 500 ppm of a recombinant collagen fragment. In some embodiments, the composition can comprise about 5 ppm, about 10 ppm, about 25 ppm, about 50 ppm, about 100 ppm, about 150 ppm, about 200 ppm, about 250 ppm, about 300 ppm, about 350 ppm, about 350 ppm, about 400 ppm, about 450 ppm, or about 500 ppm of a recombinant collagen fragment sequence variant. In some embodiments, the composition can comprise about 5 ppm, about 10 ppm, about 25 ppm, about 50 ppm, about 100 ppm, about 150 ppm, about 200 ppm, about 250 ppm, about 300 ppm, about 350 ppm, about 350 ppm, about 400 ppm, about 450 ppm, or about 500 ppm of a recombinant collagen fragment with a sequence according to SEQ ID NO: 1 or SEQ ID NO: 986. In some embodiments, the composition can comprise about 5 ppm, about 10 ppm, about 25 ppm, about 50 ppm, about 100 ppm, about 150 ppm, about 200 ppm, about 250 ppm, about 300 ppm, about 350 ppm, about 350 ppm, about 400 ppm, about 450 ppm, or about 500 ppm of one or more hydrolysis products of a recombinant collagen fragment. In some embodiments, the composition can comprise about 5 ppm, about 10 ppm, about 25 ppm, about 50 ppm, about 100 ppm, about 150 ppm, about 200 ppm, about 250 ppm, about 300 ppm, about 350 ppm, about 350 ppm, about 400 ppm, about 450 ppm, or about 500 ppm of one or more hydrolysis products of a recombinant collagen fragment with a sequence according to SEQ ID NO: 1 or SEQ ID NO: 986. In some embodiments, the composition can comprise about 5 ppm, about 10 ppm, about 25 ppm, about 50 ppm, about 100 ppm, about 150 ppm, about 200 ppm, about 250 ppm, about 300 ppm, about 350 ppm, about 350 ppm, about 400 ppm, about 450 ppm, or about 500 ppm of a recombinant collagen sequence variant according to any one of SEQ ID NOs: 987-1015. In some embodiments, the composition can comprise a mixture of a recombinant collagen fragment or variant thereof at a concentration from about 5 ppm to about 500 ppm, and one or more hydrolyzed products of that recombinant collagen fragment at a concentration from about 5 ppm to about 500 ppm. In some embodiments, the composition can comprise a mixture of a recombinant collagen fragment with a sequence according to SEQ ID NO: 1 or SEQ ID NO: 986, or a variant thereof, at a concentration from about 5 ppm to about 500 ppm, and one or more hydrolyzed products of that recombinant collagen fragment at a concentration from about 5 ppm to about 500 ppm.

[0084] In some embodiments, the composition can be prepared with about 0.1% to about 20% by volume of an about 0.5% to about 25% by weight recombinant collagen fragment solution. In some embodiments, the composition can be prepared with about 0.1% to about 20% by volume of an about 0.5% to about 25% by weight recombinant collagen fragment sequence variant solution. In some of these embodiments, the composition can comprise about 0.1%, about 0.2%, about 0.3%, about 0.4%, about 0.5%, about 0.6%, about 0.7%, about 0.8%, about 0.9%, about 1%, about 2%, about 3%, about 4%, about 5%, about 6%, about 7%, about 8%, about 9%, about 10%, about 11%, about 12%, about 13%, about 14%, about 15%, about 16%, about 17%, about 18%, about 19%, or about 20% by volume of a recombinant collagen fragment solution or recombinant collagen fragment sequence variant solution. In some of these embodiments, the recombinant collagen fragment solution comprises about 0.5%, about 0.6%, about 0.7%, about 0.8%, about 0.9%, about 1%, about 2%, about 3%, about 4%, about 5%, about 6%, about 7%, about 8%, about 9%, about 10%, about 11%, about 12%, about 13%, about 14%, about 15%, about 16%, about 17%, about 18%, about 19%, about 20%, about 21%, about 22%, about 23%, about 24% or about 25% by weight of the recombinant collagen fragment or about 0.5%, about 0.6%, about 0.7%, about 0.8%, about 0.9%, about 1%, about 2%, about 3%, about 4%, about 5%, about 6%, about 7%, about 8%, about 9%, about 10%, about 11%, about 12%, about 13%, about 14%, about 15%, about 16%, about 17%, about 18%, about 19%, about 20%, about 21%, about 22%, about 23%, about 24% or about 25% by weight of the recombinant collagen fragment sequence variant. In some of these embodiments, the recombinant collagen fragment solution comprises about 0.1%, about 0.2%, about 0.3%, about 0.4%, about 0.5%, about 0.6%, about 0.7%, about 0.8%, about 0.9%, about 1%, about 2%, about 3%, about 4%, about 5%, about 6%, about 7%, about 8%, about 9%, about 10%, about 11%, about 12%, about 13%, about 14%, about 15%, about 16%, about 17%, about 18%, about 19%, about 20%, about 21%, about 22%, about 23%, about 24% or about 25% by weight of a collagen fragment with a sequence according to SEQ ID NO: 1 or SEQ ID NO: 986. In some of these embodiments, the recombinant collagen fragment solution comprises about 0.1%, about 0.2%, about 0.3%, about 0.4%, about 0.5%, about 0.6%, about 0.7%, about 0.8%, about 0.9%, about 1%, about 2%, about 3%, about 4%, about 5%, about 6%, about 7%, about 8%, about 9%, about 10%, about 11%, about 12%, about 13%, about 14%, about 15%, about 16%, about 17%, about 18%, about 19%, about 20%, about 21%, about 22%, about 23%, about 24% or about 25% by weight of one or more hydrolyzed products of a recombinant collagen fragment. In some of these embodiments, the recombinant collagen fragment solution comprises about 0.1%, about 0.2%, about 0.3%, about 0.4%, about 0.5%, about 0.6%, about 0.7%, about 0.8%, about 0.9%, about 1%, about 2%, about 3%, about 4%, about 5%, about 6%, about 7%, about 8%, about 9%, about 10%, about 11%, about 12%, about 13%, about 14%, about 15%, about 16%, about 17%, about 18%, about 19%, about 20%, about 21%, about 22%, about 23%, about 24% or about 25% by weight of one or more hydrolyzed products of a recombinant collagen fragment with sequences according to one or more of SEQ ID NOs: 2-972. In some of these embodiments, the recombinant collagen fragment sequence variant solution comprises about 0.1%, about 0.2%, about 0.3%, about 0.4%, about 0.5%, about 0.6%, about 0.7%, about 0.8%, about 0.9%, about 1%, about 2%, about 3%, about 4%, about 5%, about 6%, about 7%, about 8%, about 9%, about 10%, about 11%, about 12%, about 13%, about 14%, about 15%, about 16%, about 17%, about 18%, about 19%, about 20%, about 21%, about 22%, about 23%, about 24% or about 25% by weight of one or recombinant collagen fragment sequence variants with sequences according to one or more of SEQ ID NOs: 987-1015. In some of these embodiments, the composition can be prepared using about 0.1% to about 20% by volume of an about 0.5% to about 25% by weight of a mixture of a recombinant collagen fragment and one or more hydrolyzed products of that recombinant collagen fragment. In some of these embodiments, the composition can be prepared using about 0.1% to about 20% by volume of an about 0.5% to about 25% by weight of a mixture of a recombinant collagen fragment with a sequence according to SEQ ID NO: 1 or SEQ ID NO: 986 and one or more hydrolyzed products of that recombinant collagen fragment.

[0085] In some embodiments, the composition can be prepared using about 0.1% to about 20% by volume of an about 0.5% to about 25% by weight solution comprising a mixture of recombinant collagen fragments with a sequence according to SEQ ID NO: 1 or SEQ ID NO: 986 and one or more hydrolyzed products of either recombinant collagen fragment. In some embodiments, the composition can be prepared using about 0.1% to about 20% by volume of an about 0.5% to about 25% by weight solution comprising a mixture of a recombinant collagen fragment sequence variants with sequences according to any one of SEQ ID NOs: 987-1015. In some embodiments, the composition can be prepared with about 0.1% to about 20% by volume of an about 0.5% to about 25% by weight solution comprising a mixture of a recombinant collagen fragment with a sequence according to SEQ ID NO: 1 or SEQ ID NO: 986 and one or more hydrolyzed products of either recombinant collagen fragment and a recombinant collagen fragment sequence variant solution comprising sequence variants with sequences according to any one of SEQ ID NOs: 987-1015

[0086] In some of these embodiments, the recombinant collagen fragment and recombinant collagen fragment sequence variant solution comprises about 0.1%, about 0.2%, about 0.3%, about 0.4%, about 0.5%, about 0.6%, about 0.7%, about 0.8%, about 0.9%, about 1%, about 2%, about 3%, about 4%, about 5%, about 6%, about 7%, about 8%, about 9%, about 10%, about 11%, about 12%, about 13%, about 14%, about 15%, about 16%, about 17%, about 18%, about 19%, about 20%, about 21%, about 22%, about 23%, about 24% or about 25% by weight of one or more hydrolyzed products of a recombinant collagen fragment with sequences according to one or more of SEQ ID NOs: 2-972.

[0087] In some embodiments, the composition can comprise from about 0.0005% to about 25% by weight of a recombinant collagen fragment, from about 0.001% to about 25% by weight of a recombinant collagen fragment, from about 0.01% to about 25% by weight of a recombinant collagen fragment, from about 0.1% to about 25% by weight of a recombinant collagen fragment, from about 0.5% to about 20% by weight of a recombinant collagen fragment, from about 0.7% to about 17% by weight of recombinant collagen fragment, from about 1% to about 15% by weight of recombinant collagen fragment, from about 2% to about 12% by weight of recombinant collagen fragment, from about 2% to about 10% by weight of recombinant collagen fragment, from about 3% to about 9% by weight of recombinant collagen fragment, from about 4% to about 8% by weight of recombinant collagen fragment, or from about 5% to about 7% by weight of recombinant collagen fragment.

[0088] In some embodiments, the composition can comprise about 0.0005%, about 0.001%, about 0.01%, about 0.1%, about 0.2%, about 0.3%, about 0.4%, about 0.5%, about 0.6%, about 0.7%, about 0.8%, about 0.9%, about 1%, about 2%, about 3%, about 4%, about 5%, about 6%, about 7%, about 8%, about 9%, about 10%, about 11%, about 12%, about 13%, about 14%, about 15%, about 16%, about 17%, about 18%, about 19%, about 20%, about 21%, about 22%, about 23%, about 24% or about 25% by weight of a recombinant collagen fragment. In some embodiments, the composition can comprise about 0.0005%, about 0.001%, about 0.01%, about 0.1%, about 0.2%, about 0.3%, about 0.4%, about 0.5%, about 0.6%, about 0.7%, about 0.8%, about 0.9%, about 1%, about 2%, about 3%, about 4%, about 5%, about 6%, about 7%, about 8%, about 9%, about 10%, about 11%, about 12%, about 13%, about 14%, about 15%, about 16%, about 17%, about 18%, about 19%, about 20%, about 21%, about 22%, about 23%, about 24% or about 25% by weight of a collagen fragment with a sequence according to SEQ ID NO: 1 or SEQ ID NO: 986. In some embodiments, the composition can comprise about 0.0005%, about 0.001%, about 0.01%, about 0.1%, about 0.2%, about 0.3%, about 0.4%, about 0.5%, about 0.6%, about 0.7%, about 0.8%, about 0.9%, about 1%, about 2%, about 3%, about 4%, about 5%, about 6%, about 7%, about 8%, about 9%, about 10%, about 11%, about 12%, about 13%, about 14%, about 15%, about 16%, about 17%, about 18%, about 19%, about 20%, about 21%, about 22%, about 23%, about 24% or about 25% by weight of one or more hydrolysis products of a recombinant collagen fragment. In some embodiments, the composition can comprise about 0.0005%, about 0.001%, about 0.01%, about 0.1%, about 0.2%, about 0.3%, about 0.4%, about 0.5%, about 0.6%, about 0.7%, about 0.8%, about 0.9%, about 1%, about 2%, about 3%, about 4%, about 5%, about 6%, about 7%, about 8%, about 9%, about 10%, about 11%, about 12%, about 13%, about 14%, about 15%, about 16%, about 17%, about 18%, about 19%, about 20%, about 21%, about 22%, about 23%, about 24% or about 25% by weight of one or more hydrolysis products of a recombinant collagen fragment with sequences according to one or more of SEQ ID NOs: 2-972. In some embodiments, the composition can comprise about 0.0005%, about 0.001%, about 0.01%, about 0.1%, about 0.2%, about 0.3%, about 0.4%, about 0.5%, about 0.6%, about 0.7%, about 0.8%, about 0.9%, about 1%, about 2%, about 3%, about 4%, about 5%, about 6%, about 7%, about 8%, about 9%, about 10%, about 11%, about 12%, about 13%, about 14%, about 15%, about 16%, about 17%, about 18%, about 19%, about 20%, about 21%, about 22%, about 23%, about 24% or about 25% by weight of a mixture of a recombinant collagen fragment and one or more hydrolysis products of that recombinant collagen fragment. In some embodiments, the cosmetic composition can about 0.0005%, about 0.001%, about 0.01%, about 0.1%, about 0.2%, about 0.3%, about 0.4%, about 0.5%, about 0.6%, about 0.7%, about 0.8%, about 0.9%, about 1%, about 2%, about 3%, about 4%, about 5%, about 6%, about 7%, about 8%, about 9%, about 10%, about 11%, about 12%, about 13%, about 14%, about 15%, about 16%, about 17%, about 18%, about 19%, about 20%, about 21%, about 22%, about 23%, about 24% or about 25% by weight of a mixture of a recombinant collagen fragment with a sequence according to SEQ ID NO: 1 or SEQ ID NO: 986 and one or more hydrolysis products of that recombinant collagen fragment.

[0089] In some embodiments, the composition can comprise from about 0.0005% to about 25% by weight of a recombinant collagen fragment sequence variant, from about 0.001% to about 25% by weight of a recombinant collagen fragment sequence variant, from about 0.01% to about 25% by weight of a recombinant collagen fragment sequence variant, from about 0.1% to about 25% by weight of a recombinant collagen fragment sequence variant, from about 0.5% to about 20% by weight of a recombinant collagen fragment sequence variant, from about 0.7% to about 17% by weight of recombinant collagen fragment sequence variant, from about 1% to about 15% by weight of recombinant collagen fragment sequence variant, from about 2% to about 12% by weight of recombinant collagen fragment sequence variant, from about 2% to about 10% by weight of recombinant collagen fragment sequence variant, from about 3% to about 9% by weight of recombinant collagen fragment, from about 4% to about 8% by weight of recombinant collagen fragment sequence variant, or from about 5% to about 7% by weight of recombinant collagen fragment sequence variant.

[0090] In some embodiments, the composition can comprise about 0.0005%, about 0.001%, about 0.01%, about 0.1%, about 0.2%, about 0.3%, about 0.4%, about 0.5%, about 0.6%, about 0.7%, about 0.8%, about 0.9%, about 1%, about 2%, about 3%, about 4%, about 5%, about 6%, about 7%, about 8%, about 9%, about 10%, about 11%, about 12%, about 13%, about 14%, about 15%, about 16%, about 17%, about 18%, about 19%, about 20%, about 21%, about 22%, about 23%, about 24% or about 25% by weight of a recombinant collagen fragment sequence variant. In some embodiments, the composition can comprise about 0.0005%, about 0.001%, about 0.01%, about 0.1%, about 0.2%, about 0.3%, about 0.4%, about 0.5%, about 0.6%, about 0.7%, about 0.8%, about 0.9%, about 1%, about 2%, about 3%, about 4%, about 5%, about 6%, about 7%, about 8%, about 9%, about 10%, about 11%, about 12%, about 13%, about 14%, about 15%, about 16%, about 17%, about 18%, about 19%, about 20%, about 21%, about 22%, about 23%, about 24% or about 25% by weight of a collagen fragment sequence variant with a sequence according to any one of SEQ ID NOs: 987-1015. In some embodiments, the composition can comprise about 0.0005%, about 0.001%, about 0.01%, about 0.1%, about 0.2%, about 0.3%, about 0.4%, about 0.5%, about 0.6%, about 0.7%, about 0.8%, about 0.9%, about 1%, about 2%, about 3%, about 4%, about 5%, about 6%, about 7%, about 8%, about 9%, about 10%, about 11%, about 12%, about 13%, about 14%, about 15%, about 16%, about 17%, about 18%, about 19%, about 20%, about 21%, about 22%, about 23%, about 24% or about 25% by weight of a mixture of a recombinant collagen fragment and one or more recombinant collagen fragment sequence variants. In some embodiments, the cosmetic composition can about 0.0005%, about 0.001%, about 0.01%, about 0.1%, about 0.2%, about 0.3%, about 0.4%, about 0.5%, about 0.6%, about 0.7%, about 0.8%, about 0.9%, about 1%, about 2%, about 3%, about 4%, about 5%, about 6%, about 7%, about 8%, about 9%, about 10%, about 11%, about 12%, about 13%, about 14%, about 15%, about 16%, about 17%, about 18%, about 19%, about 20%, about 21%, about 22%, about 23%, about 24% or about 25% by weight of a mixture of a recombinant collagen fragment with a sequence according to SEQ ID NO: 1 or SEQ ID NO: 986 and one or more collagen fragment sequence variants with a sequence according to any one of SEQ ID NOs: 987-1015.

### Skin Care

[0091] In some embodiments, the compositions described herein can be used to improve the aesthetic appearance of the skin and/or its appendages, for example, the surface appearance and/or texture of the skin. In some embodiments, the compositions described herein can be formulated for use on the body and face, hands, and feet, including as treatment for the eye area, for nails, and hair. The term “surface appearance” means the visual and/or tactile irregularities in the skin and/or in the scalp, including wrinkles and fine lines, expression lines on the forehead and in the space between the eyebrows, wrinkles and/or fine lines around the mouth, and/or slackening in the area around the lips and the top lip area (area located between the top lip and the nose), heterogeneity of the skin tone (liver spots, actinic lentigos), appearance and/or visibility of the pores, papery appearance of the skin, defects in the skin microrelief such as chicken pox or acne scars, imperfections of greasy skin (shiny appearance, etc.). The term “skin texture” can mean slack, flabby, less firm, less elastic skin, and/or skin that has sagged.

[0092] In some embodiments, the compositions described herein can be used to improve the aesthetic appearance of the skin, including improvement in the appearance of expression lines. Expression lines are produced by the effect of the stress exerted on the skin by the underlying muscles. Age and environmental factors such as exposure to sunlight, can deepen expression lines and make them permanent. Expression lines are characterized by the presence of grooves in the area around the orifices formed by the nose (nasal grooves), the mouth (perioral lines and so-called bitterness lines) and the eyes (crow's feet wrinkles), around which the skin muscles are located, and also between the eyebrows (glabella or lion wrinkles) and on the forehead.

[0093] In some embodiments, the compositions described herein can be used to improve the aesthetic appearance of the skin and/or visibility of the pores. Visibility of the pores can be due to an excess of sebum, aging, loss of firmness, slackening, stress, fatigue, unsuitable hygiene, climatic factors, or any combination thereof. The compositions described herein can tighten the pores, making them less visible.

[0094] In some embodiments, the compositions described herein can be used to improve a papery appearance of the skin and the behavior of the skin to the touch. Specifically, older skin can visually take on the appearance of cigarette paper, giving it an appearance similar to that of a sheet of papyrus. The papery appearance of the skin can be seen on the face and on the back of the hands of the elderly.

[0095] In some embodiments, the compositions described herein can be a composition for protecting, treating or caring for the face, for the hands, for the feet, or for the body, for example, day creams, night creams, makeup remover creams, anti-sun compositions, body milks for skin protection or care, after-sun milks, skincare lotions, gels, foams, artificial tanning compositions, and aftershave compositions. In some embodiments, the compositions described herein can be formulated, for example, as solutions, suspensions, lotions, creams, serums, gels, balms, gels, oils, oil in creams, micellar waters, face mists, face essences, blemish balm or complexion corrector formulas, toners (water and/or alcohol based), paints, polishes, sticks, pencils, sprays, aerosols, ointments, cleansing liquid washes, solid bars, shampoos, hair conditioners, hair styling products, pastes, foams, powders, mousses, balms, shaving creams, wipes, strips, patches, wound dressings, adhesive bandages, hydrogels, film-forming products, facial and skin masks, cosmetics (e.g. foundations, eye liners, eye shadows), exfoliators, deodorants and anti-perspirants, and the like. Exemplary formulations are provided herein.

[0096] In some embodiments, the composition described herein can be a cosmetic composition and the at least one excipient can be a cosmetically acceptable excipient. Cosmetically acceptable excipients are excipients suitable for use in a cosmetic product. Exemplary cosmetically acceptable excipients are described below.

[0097] In some embodiments, the cosmetic composition described herein can comprise a hydrolysis product of a recombinant collagen fragment and at least one excipient, e.g., a cosmetically acceptable excipient. In some embodiments, the cosmetic compositions described herein can comprise a recombinant collagen fragment, one or more hydrolyzed products of that recombinant collagen fragment, and at least one excipient, e.g., a cosmetically acceptable excipient.

[0098] In some embodiments, the cosmetic composition can comprise ingredients commonly used in cosmetic, e.g., skin care, eye care, nail care, and hair care products. These ingredients can include, but are not limited to, soaps, antimicrobials, anti-inflammatories, moisturizers, waxy alcohols, hydration agents, moisturizers, penetration enhancers, emulsifiers, natural or synthetic oils, solvents, fats, surfactants, detergents, gelling agents, emollients, antioxidants, fragrances, paints, polishes, fillers, thickeners, waxes, odor absorbers, dyestuff, coloring agents, powders, viscosity-controlling agents, anesthetics, anti-itch agents, botanical extracts, conditioning agents, darkening or whitening agents, humectants, mica, minerals, polyphenols, silicones or silicone derivatives such as dimethicone, sun blocks, vitamins, phytomedicinals, alcohols, such as denatured alcohols and ethanol, polyols, polyolethers, and other ingredients listed in the International Cosmetic Ingredient Dictionary and Handbook, 13th Ed. (2009), the entirety of which is incorporated herein by reference. In certain embodiments, a given ingredient can perform more than one function and can belong to more than one class.

[0099] In some embodiments, the composition described herein can be a therapeutic composition and the at least one excipient can be a therapeutically acceptable excipient. Therapeutic compositions can be useful for treating one or more conditions such as reducing or preventing the formation of scar tissue, promoting healing, promoting tissue regeneration, minimizing local inflammation, minimizing tissue rejection, and/or enhancing skin and/or hair graft integration. Therapeutically acceptable excipients are excipients that can serve as a vehicle or medium for an active substance and include excipients commonly used in therapeutic compositions, i.e., compositions useful for treating one or more conditions. Exemplary therapeutically acceptable excipients are described below.

[0100] In some embodiments, the composition described herein can be a dietary composition or dietary supplement, and the at least one excipient can be, for example, a food or drink additive. A “dietary supplement” is a preparation intended to supplement the diet and can be useful for providing nutrients or additives that may be missing or may not be consumed in sufficient quantities in a person's diet. In some embodiments, the dietary supplement can be provided in the form of any commonly used solid or liquid dosage form for oral administration including, without limitation, a capsule, a tablet, a pill, a powder, a granule or powder, a soft and hard gelatin capsule, and/or as a gummy. Suitable excipients include, but are not limited to, lactose or milk sugar as well as high molecular weight polyethyleneglycols, and the like. Exemplary dietary compositions are described below.

[0101] The compositions described herein can also include one or more of the following additional components. Exemplary contemplated additional ingredients are set forth below; however, this disclosure is not limited to these exemplary additional ingredients.

[0102] In some embodiments, the composition described herein can further comprise one or more anti-wrinkle agents. An anti-wrinkle agent is a compound which produces an increase in the synthesis and/or in the activity of certain enzymes of the skin, when the composition is brought into contact with an area of wrinkled skin, e.g., on the body or face, including the eye area, which reduces the outward appearance of the wrinkles and/or fine lines. Exemplary anti-wrinkle agents include, but are not limited to, desquamating agents, antiglycation agents, nitric oxide synthase inhibitors, muscle relaxants and/or dermo-decontracting agents, agents for combating free radicals, and mixtures thereof.

[0103] Additional exemplary anti-wrinkle agents that can be included in the composition described herein include, but are not limited to, adenosine and its derivatives, retinol and its derivatives (e.g., retinyl palmitate), ascorbic acid and its derivatives (e.g., magnesium ascorbyl phosphate and ascorbyl glucoside), tocopherol and its derivatives (e.g., tocopheryl acetate), nicotinic acid and its precursors (e.g., nicotinamide), ubiquinone, glutathione and its precursors (e.g., L-2-oxothiazolidine-4-carboxylic acid), C-glycoside compounds (also known as C-glycosyl compounds) and their derivatives (e.g., a 3-C-xylosyl derivative with the trade name PRO-XYLANE, plant extracts (e.g., rock samphire extracts and olive leaf extracts), plant proteins and their hydrolysates (e.g., rice or soybean protein hydrolysates), algal extracts (e.g., laminarian extracts), bacterial extracts, sapogenins (e.g., diosgenin), Dioscorea extracts (e.g., wild yam extracts), α-hydroxy acids, β-hydroxy acids (e.g., salicylic acid and 5-(n-octanoyl) salicylic acid), oligopeptides and pseudodipeptides and their acylated derivatives (e.g., {2-[acetyl (3-(trifluoromethyl) phenyl) amino]-3-methylbutyrylamino}acetic acid), lipopeptides e.g. MATRIXYL 3000 available from Croda), lycopene, manganese, magnesium salts (e.g., gluconates), and combinations of any of the foregoing.

[0104] Exemplary adenosine derivatives include, but are not limited to, 2′-deoxyadenosine; 2′,3′-iso-propylideneadenosine; toyocamycin, 1-methyladenosine; N-6-methyladenosine, adenosine N-oxide, 6-methyl-mercaptopurine riboside, and 6-chloropurine riboside. Other adenosine derivatives comprise adenosine receptor agonists, including phenylisopropyladenosine (“PIA”)/1-methylisoguanosine, Ns-cyclohexyladenosine (CHA), N6-cyclopentyladenosine (CPA), 2-chloro-Ns-cyclopentyladenosine, 2-chloroadenosine, N6-phenyladenosine, 2-phenylaminoadenosine, MECA, Ne-phenethyladenosine, 2-p-(2-carboxyethyl) phenethylamino-5′-N-ethylcarboxamido-adenosine (CGS-21680), (N-ethylcarboxamido) adenosine-S-(NECA), 5′-(N-cyclopropylcarboxamido) adenosine, DPMA (PD 129,944), and metrifudil.

[0105] In some embodiments, the composition described herein can comprise one or more adenosine derivatives that increase the intracellular concentration of adenosine, such as erythro-9-(2-hydroxy-3-nonyl) adenine (“EHNA”), iodotubercidin, or combinations thereof. Additional adenosine derivatives contemplated herein include adenosine salts and alkyl esters of adenosine.

[0106] In some embodiments, the composition can further comprise one or more pearlescent agents. Pearlescent agents are iridescent particles of any shape produced in particular by certain shellfish in their shells. Alternatively, pearlescent agents can be synthesized, i.e. man made. The pearlescent agents can be chosen from white pearlescent agents such as, but not limited to, mica covered with titanium oxide or with bismuth oxychloride, colored pearlescent agents such as, but not limited to, pearlescent agents based on bismuth oxychloride, titanium oxide-coated mica covered with iron oxides, titanium oxide-coated mica covered with in particular ferric blue or chromium oxide, or titanium oxide-coated mica covered with an organic pigment.

[0107] In some embodiments, the composition can further comprise one or more hydroxy acids. Examples of hydroxy acids include beta hydroxy acids such as salicylic acid, acetylsalicylic acid, and the like. Additional exemplary hydroxy acids suitable for use in the composition include citric acid, glycolic acid, hydroxycaproic acid, hydroxycaprylic acid, lactic acid, malic acid, tartaric acid, polyhydroxy acids including gluconolactone, and any combination thereof.

[0108] In some embodiments, the composition can further comprise one or more emulsifiers. An emulsifier keeps unlike ingredients (such as oil and water) from separating in an emulsion. Suitable emulsifiers include but are not limited to: polysorbates, laureth-4, potassium cetyl sulfate, glyceryl caprylate, and any combinations thereof.

[0109] In some embodiments, the composition can further comprise one or more chelating agents. Chelating agents bind with metal ions and prevent them from chemically reacting with other substances in a formulation. Suitable chelating agents include but are not limited to: sodium phytate, disodium EDTA, tetrasodium EDTA, tetrasodium glutamate diacetate, and trisodium ethylenediamine disuccinate.

[0110] In addition to a chelating agent, tetrasodium glutamate diacetate can also act as a stabilizer in any of the compositions described herein.

[0111] In some embodiments, the composition can further comprise one or more antimicrobials. Suitable antimicrobials include but are not limited to: caprylyl glyceryl ether, benzalkonium chloride, benzethonium chloride, and chloroxylenol (PCMX), tea tree oil, witch hazel, rosemary oil, lemon oil, and any combination thereof.

[0112] In some embodiments, the composition can further comprise one or more humectants (water-retaining agents) to improve the level of moisture in the skin. Non-limiting examples of suitable humectants for use in the compositions described herein are described in WO 98/22085, WO 98/18444, and WO 97/01326 and include: amino acids and derivatives thereof such as proline and arginine aspartate, 1,3-butylene glycol, propylene glycol, pentylene glycol, water, codium tomentosum extract, creatinine, diglycerol, biosaccharide gum-1, glucamine salts, glucuronic acid salts, glutamic acid salts, polyethylene glycol ethers of glycerine (e. g. glycereth 20), glycerine, glycerol monopropoxylate, glycogen, hexylene glycol, honey, hydrogenated starch hydrolysates, hydrolyzed mucopolysaccharides (such as xanthan gum and biosaccharide gum-1), inositol, keratin amino acids, glycosaminoglycans, methoxy PEG 10, methyl gluceth-10 and -20, methyl glucose, 3-methyl-1,3-butanediol, N-acetyl glucosamine salts, polyethylene glycol and derivatives thereof (such as PEG 15 butanediol, PEG 4, PEG 5 pentaerythitol, PEG 6, PEG 8, PEG 9), propanediol, pentaerythitol, 1,2 pentanediol, PPG-1 glyceryl ether, 2-pyrrolidone-5-carboxylic acid (including salts and esters thereof), saccharide isomerate, sericin, silk amino acids, sodium acetylhyaluronate, sodium hyaluronate, sodium poly-aspartate, sodium polyglutamate, caprylyl glycol, sorbeth 20, sorbeth 6, sugar and sugar alcohols and derivatives thereof such as glucose, mannose and polyglycerol sorbitol, trehalose, triglycerol, trimethyolpropane, tris (hydroxymethyl) amino methane salts, and yeast extract, and mixtures thereof.

[0113] Additional humectants suitable for use herein include polyhydric alcohols selected from the group consisting of glycerin, diglycerin, glycerol, erythritol, arabitol, xylitol, ribitol, mannitol, sorbitol, galactitol, fucitol, maltitol, mannose, inositol, triethyleneglycol, sodium pyrrolidone carboxylic acid (PCA), zinc PCA and derivatives and mixtures thereof.

[0114] In some embodiments, the composition can further comprise a gelling agent comprising a polyacrylamide-based polymer. The polyacrylamide-based polymer can, aside from being polyacrylamide itself, be a derivative thereof, and can be a mixture of a plurality of types of polymers, and can also be a copolymer with acrylamide and its derivatives as monomers. A gelling agent can be used to provide a good appearance to the skin, provide a sense of coolness to the skin, and provide a sense of refreshment without stickiness to the skin. In some embodiments, a gelling agent can include one or more pigments, or one or more fillers, including inorganic pigments, including extender pigments, coloring pigments, and whitening pigments, organic pigments, pearlescent gloss pigments, macromolecular powders, functional pigments, talc, mica, kaolin, calcium carbonate, magnesium carbonate, silicic anhydride, aluminum silicate, magnesium silicate, calcium silicate, aluminum oxide, barium sulfate, red iron oxide, yellow iron oxide, black iron oxide, chrome oxide, ultramarine blue, prussian blue, carbon black, zinc oxide, mica titanium, fish scale flakes, bismuth oxychloride, boron nitride, nylon powder, silk powder, carbomer, tar pigments, natural pigments and titanium oxide, such as amorphous or rutile type and/or anatase type crystals.

[0115] In some embodiments, the composition can comprise a pigment and/or filler that is resistant to water and an oil and can further include any conventionally used water-repellent and/or oil-repellent agent to confer water repellence and oil repellence to pigments, for example, fluorine compounds. Representative fluorine compounds which are conventionally used and can act as water-repellent and oil-repellent agents include compounds having perfluoroalkyl groups such as perfluororalkyl phosphates, perfluoroalkyl silanes, perfluoroalkyl silazanes, polyhexafluoropropylene oxides, perfluoroalkyl-group-containing organosiloxanes, per-fluoropolyethers, perfluoro alcohols, perfluoroalkylacrylate polymers, and derivatives thereof. Perfluoroalkyl phosphates can provide a uniform and stable dispersement of pigments within the formulation of a gel composition, and perfluoroalkyl silanes can have exceptional compatibility with other cosmetic ingredients. Additionally, the perfluoroalkyl phosphate-diethanol amine salt marketed by Asahi Glass as AsahiGuard AG530, and perfluoroalkyl silane coupling agents, such as LP-IT and LP-4T of Shin-Etsu Silicone, can be used.

[0116] Representative gelling agents include, but are not limited to, those marketed by Seppic under the trade names Sepigel 305, Sepigel 501, and Sepigel 600. Sepigel 305 is a mixture containing approximately 40% polyacrylamide, approximately 24% —C₁₃-C₁₄ isoparaffin and approximately 6% Laureth-7 (here, Laureth-7 is a non-ionic surfactant having the formula C₁₂H₂₅—(OCH₂CH₂)ₙ—OH, wherein n has an average value of 7). Sepigel 600 is a mixture of a acrylamide/acrylamide-2-propane sulfonate copolymer, isohexadecane and polysorbate 80 (polyoxyethylene sorbitan mono-oleate (20 EO)). A suitable gelling agent comprising a polyacrylamide-based polymer is disclosed in EP 0 503 853 (Scott Bader Company Ltd.), the disclosure of which is incorporated by reference herein.

[0117] In some embodiments, the composition can further comprise hyaluronic acid (HA). In some embodiments, the HA can be in an uncrosslinked state. In some embodiments, the HA can be in a crosslinked state. Like collagen, HA is an important structural component of human tissues. Hyaluronan, also known as hyaluronic acid (HA) is a non-sulfated glycosaminoglycan that is distributed widely throughout the human body in connective, epithelial, and neural tissues. Hyaluronan is abundant in the different layers of the skin, where it has multiple functions such as, e.g., to ensure good hydration, to assist in the organization of the extracellular matrix, to act as a filler material; and to participate in tissue repair mechanisms. However, with age, the quantity of hyaluronan present in the skin decreases.

[0118] In some embodiments, the composition described herein can be a dermal filler composition, e.g., an injectable dermal filler composition. Dermal fillers are generally made of collagens and can optionally comprise HA. Dermal filler compositions can be suitable for use on the face and body, including, e.g., around the eyes, on or around the cheeks, on or around the decolletage, on or around the hands, on or around the nails, on or around the ears, including on the earlobes, on or around the legs, and on or around the feet.

[0119] In some embodiments, the composition described herein can be used with a microneedle array, such as an array included in a sheet or patch. Microneedle arrays can comprise a plurality of microneedles that are of a length sufficient to penetrate the skin across the stratum corneum and into the viable epidermis. It some embodiments it can be desirable to deliver polypeptides to the area of epidermal/dermal junction for cosmetic or therapeutic purposes.

[0120] In some embodiments, the composition described herein can be used with microneedle sheets or patches. Microneedles and microneedle patches are suitable for delivering collagen into the epidermis and dermis of human skin on the face and body, including, e.g., the eyes, the cheeks, the lips, the decolletage, and the hands. In some embodiments, the microneedles for delivering compositions into the epidermis and dermis in a targeted manner are injectable microneedles, drug coated metal microneedles, or microneedles having dissolvable tips. Exemplary methods and disclosures regarding microneedles can be found in, for example, Aditya et al., Kinetics of collagen microneedle drug delivery system, Journal of Drug Delivery Science and Technology, vol. 52, pp. 618-623 (August 2019) and Sun et al., Transdermal Delivery of Functional Collagen Via Polyvinylpyrrolidone Microneedles, Ann. Biomed. Eng., 43(12):2978-2990 (2015), each of which is incorporated by reference in its entirety.

[0121] In some embodiments, the composition can further comprise a waxy lipid, e.g., a ceramide. Ceramides help create a barrier to prevent permeability, which helps prevent dryness and irritation and can also protect the epidermis from environmental damage.

[0122] In some embodiments, the composition can further comprise vitamin A or a vitamin A derivative. Examples of vitamin derivatives include, but are not limited to, retinoids such as retinal, retinoic acid, retinoate, retinyl ester, retinol, tretinoin, isotretinoin, adapalene, tazarotene, and the like. The term “retinoids” includes cis and trans derivatives of retinoids (e.g. all-trans-retinoic acid, 13-cis-retinoic acid, 13-trans retinoic acid, and 9-cis-retinoic acid).

[0123] In some embodiments, the composition can further comprise vitamin C or its derivatives, e.g., ascorbic acid, ascorbate (e.g. tetrahexyldecyl ascorbate), and the like.

[0124] In some embodiments, the composition can further comprise vitamin B, e.g., biotin, (i.e., vitamin B7), niacinamide, and the like.

[0125] In some embodiments, the composition can further comprise vitamin E, e.g. α-, β-, γ-, and α-tocopherols and their related corresponding tocotrienols), and the like.

[0126] In some embodiments, the composition can further comprise vitamin K and derivatives thereof.

[0127] Any vitamin, vitamin analog, or derivative thereof that can be suitably formulated as a topical composition is contemplated for the present disclosure.

[0128] In some embodiments, the composition disclosed herein can further comprise one or more thickening agents. A thickening agent, i.e., structure builder, is able to suspend pigments and/or build viscosity in the composition. Thickeners and/or structure builders suitable for the present compositions include, but are not limited to, organically modified clays, fumed silica, trihydroxystearin, silicone gels or silicone elastomers, ammonium acryloyldimethyltaurate/VP copolymer, acrylates/C10-30 alkyl acrylate crosspolymer, and mixtures thereof.

[0129] Suitable organically modified clays include, but are not limited to, organically modified versions of hectorite, bentonite, smectite and montmorillonite clay (such as those sold under tradename BENTONE® from Elementis Specialties, TIXO-GEL® from Sud-Chemie, and CLAYTONE® from Southern Clay Products). Hydrophilically modified fumed silicas include, but are not limited to, WACKER HDK® N20 and T30 grades (Wacker-Chemie AG), and hydrophilic grades under tradename of AEROSIL® (Evonik). Silicone gels or silicone elastomers include, but are not limited to, the “KSG” thickening series (KSG-15, KSG-16. KSG-18, KSG-41, KSG-42, KSG-43, KSG-44) from Shin-Etsu Silicones, DOW CORNING®9040, 9041, 9045, and 9546 silicone elastomer blends from Dow Corning, SFE839™, and Velvesil™ silicone gels from Momentive Performance Materials, and WACKER-BELSIL® RG-100 from Wacker-Chemie AG.

[0130] In some embodiments, the compositions disclosed herein can further comprise one or more lipo-soluble/lipo-dispersible film-forming agent. Lipo-soluble/lipo-dispersible film-forming agents suitable for use herein include, but are not limited to, organic silicone resins (e.g., trimethylsiloxysilicate such as SRI 000 from GE Silicones) and copolymers of organic silicone resins (e.g., diisostearyl trimethylolpropane siloxy silicate such as SF1318 from GE Silicones); fluorinated silicone resins; acrylic and/or vinyl based polymers or copolymers, including silicone and/or fluorinated versions (e.g., the “KP” series of silicone acrylates from Shin-Etsu Silicones, and 3M™ Silicones “Plus” Polymer VS70 and SA70); polyurethanes (e.g., the hydroxyester triglyceride derived Poly derm® series from Alzo International); polyesters (e.g., the Lexorez® series of polymeric polyesters from Inolex Chemical Company); and mixtures thereof.

[0131] In some embodiments, the composition disclosed herein can further comprise one or more coloring agents. Coloring agents suitable for use herein include all inorganic and organic colors/pigments, including mineral or pearl pigments suitable for use in cosmetic compositions. Such coloring agents include those either with or without a surface coating or treatment. Coloring agents can intensify coloration, and/or light scattering, and/or light reflecting effects of the composition.

[0132] In some embodiments, the composition disclosed herein can further comprise one or more sunscreens, e.g., mineral and/or physical sunscreens. Sunscreens can block UVA and/or UVB radiation. Exemplary UVA sunscreen agents include, but are not limited to, avobenzone, terephthalylidene dicamphor sulfonic acid, bis-disulizole disodium, disodium phenyl dibenzimidazole tetrasulfonate, diethylamino hydroxybenzoyl hexylbenzoate, bis-diethylamino hydroxybenzoyl benzoate, bis-benzoxazolylphenyl ethylhexylamino triazine, and combinations thereof.

[0133] Exemplary UVB sunscreen agents include, but are not limited to, octocrylene, octinoxate, octisalate, homosalate, ensulizole, ethylhexyl triazone, enzacamene, amiloxate, diethylhexyl butamido triazine, benzylidene malonate polysiloxane, padimate-O, trolamine salicylate, cinoxate, p-aminobenzoic acid and derivatives thereof, and combinations thereof.

[0134] Exemplary sunscreen agents that absorb both UVA and UVB radiation such as, for example, oxybenzone, meradimate, titanium dioxide, zinc oxide, bis-octrizole, bemotrizinol, drometrizole trisiloxane, sulisobenzone, dioxybenzone, or combinations thereof.

[0135] Specific Suitable sunscreens include but are not limited to p-aminobenzoic acid, its salts and its derivatives (ethyl, isobutyl, glyceryl esters, p-dimethylaminobenzoic acid, anthranilates (i.e., o-aminobenzoates, methyl, menthyl, phenyl, benzyl, phenylethyl, linallyl, terpinyl, and cyclohexenyl esters), salicylates (amyl, phenyl, benzyl, menthyl, glyceryl, and dipropylene glycol esters), cinnamic acid derivatives (methyl and benzyl esters, alpha-phenyl cinnamonitrile, butyl cinnamoyl pyruvate), dihydroxycinnamic acid derivatives (umbelliferone, methylumbelliferone, methylaceto umbelliferone), trihydroxycinnamic acid derivatives (esculetin, methyl eSculletin, daphnetin, and the glucosides, esculin and daphnin), hydrocarbons (diphenylbutadiene, stilbene), dibenzalacetone and benzalacetophenone, naphtholsulfonates (sodium salts of 2-naphthol-3,3-disulfonic and of 2-naphthol-6,8-disulfonic acids), cihydroxynaphthoic acid and its salts, o- and p-hydroxybiphenyldisulfonates, coumarin derivatives (7 hydroxy, 7-methyl, 3-phenyl), diazoles (2-acetyl-3-bromoindazole, phenyl benzoxazole, methylnaphthoxalole, various arylbenzothiazoles), quinine salts (bisulfate, sulfate, chloride, oleate, and tannate), quinoline derivatives (8-hydroxyquinoline salts, 2-phenylquinoline), hydroxy- or methoxy substituted benzophenones, uric and vilouric acids, tannic acid and its derivatives (e.g., hexaethylether), (butyl carbityl) (6-propyl piperonyl) ether, hydroquinone, benzophenones (oxybenzene, sulisobenzone, dioxybenzone, benzoresorcinol, 2,2,4,4′-tetrahydroxybenzophenone, 2,2′-dihydroxy4,4′-dimethoxybenzophenone, octabenzone, 4-isopropyhldibenzoylmethane, butylmethoxydibenzoylmethane, etocrylene, and 4-isopropyl-di-benzoylmethane, titanium dioxide, iron oxide, zinc oxide, and mixtures thereof. Other cosmetically-acceptable sunscreens and concentrations (percent by weight of the total cosmetic sunscreen composition) include diethanolamine methoxycinnamate (10% or less), ethyl-bis(hydroxypropyl)aminobenzoate (5% or less), glyceryl aminobenzoate (3% or less), 4-isopropyl dibenzoylmethane (5% or less), 4-methylbenzylidene camphor (6% or less), terephthalylidene dicamphor sulfonic acid (10% or less), and sulisobenzone (also called benzophenone-4, 10% or less). In some embodiments, the composition disclosed herein can further comprise D-aspartic acid and/or D-alanine and any salts thereof. As used herein, the term “derivatives” of D-aspartic acid and D-alanine indicates D-aspartic acid and D-alanine molecules that are covalently bound to any organic group via their amino groups, carboxyl groups, or side chains, provided that the effect on promoting collagen production of D-aspartic acid and D-alanine is not impaired. Exemplary organic groups include, but are not limited to, protective groups, such as N-phenylacetyl group, and 4,4′-dimethoxytrityl (DMT) group; biopolymers, such as a protein, a peptide, a saccharide, a lipid, and a nucleic acid; synthetic polymers, such as a polystyrene, a polyethylene, a polyvinyl, a polypropylene, and a polyester; and functional groups such as an ester group. The ester group may comprise, for example, an aliphatic ester, such as methyl ester, and ethyl ester; and an aromatic ester.

[0136] In some embodiments, the composition can further comprise one or more general skin care additives such as, e.g., conditioning agents such silicones. In some embodiments, the composition can further comprise one or more shark liver oils, e.g., squalane and/or squalene. In some embodiments, the composition can further comprise one or more polysaccharides produced by microalgae, e.g., alguronic acid.

[0137] In some embodiments, the composition can further comprise at least one preservative. In some embodiments, the at least one preservative can be quaternary ammonium compounds, halogenated phenols, sorbic acid, potassium sorbate, benzoic acid, sodium benzoate, sodium citrate, sodium anisate, caprylhydroxamic acid, sodium levulinate, phenoxyethanol, or combinations thereof.

[0138] The compositions described herein can have a pH in the range of about 4 to about 8, from about 4.7 to about 5.5, from about 5 to about 7, from about 6 to about 7, from about 6.1 to about 6.8, or from about 6.4 to 6.6.

### Soaps

[0139] In some embodiments, the cosmetic composition described herein can be a cleansing composition or soap, including traditional soaps in the form of solid bar and liquid soaps in the form of cleaners, makeup removers, body washes, milks, creams, foams cream gels, or gels that can be packaged in tubes, bottles, pump bottles, aerosol shower foams or foam pump bottles. Soaps can be used in a cosmetic process for cleaning the dirt residues of human keratinous materials in the presence of water, massed to form a foam and the formed foam and the soil residues are removed by rinsing with water, and can be used on any part of the body and face disclosed herein, including, for example, on the skin of the body, face, hands, lips, eyelids, nails, hair, eyelashes and/or eyebrows.

[0140] Traditionally, solid soaps include alkali metal fatty acid salts and potassium fatty acid soaps, and liquid soaps include four main families of detergent formulation: (1) those based on lauryl sulfate; those based on alpha-olefin sulfonate, (3) those based on a mixture of synthetic anionic, amphoteric and/or nonionic surfactants; (4) mixed formulations based on soaps and synthetic surfactants. Liquid soaps generally contain a thickening system chosen, for example, from electrolytes such as sodium chloride, potassium chloride or potassium sulphate; alkanolamides such as cocamide DEA or cocamide MWA; esters of polyethylene glycol and monoacid or stearic acid such as polyethylene glycol distearate 6000 or mixtures thereof, and are contained in a cosmetically acceptable aqueous medium. However, both solid and liquid soaps can comprise any suitable additional ingredients such as those listed below herein, in any combination.

[0141] In some embodiments, the cleansing composition or soap described herein can further comprise one or more cellulosic compounds, or polysaccharide compound having in its structure chains of glucose residues linked by β-1,4 bonds, one or more fatty acids comprising a linear or branched, saturated or unsaturated alkyl chain having from 6 to 30 carbon atoms or 12 to 22 carbon atoms, one or more fatty acids, including lauric acid, myristic acid, palmitic acid and stearic acid, linolenic acid, and mixtures thereof, and one or more mineral bases, including alkali metal hydroxides (sodium hydroxide and potassium hydroxide), metal hydroxides or ammonia or organic bases such as triethanolamine, monethanolamine, monoisopropanolmaine, N-methylglucamine, lysine and arginine.

[0142] In some embodiments, the composition described herein can further comprise one or more anionic surfactants or salts, including alkali metal salts such as sodium salts, ammonium salts, amine salts, aminoalcohol salts or salts. alkaline earth metals, for example, magnesium, of the following types: alkyl sulphates, alkyl ether sulphates, alkyl amido ether sulphates, alkyl aryl polyether sulphates, monoglyceride sulphates; alkylsulfonates, alkylamidesulfonates, alkylarylsulphonates, α-olefin-sulfonates, paraffin-sulfonates; alkylsulfosuccinates, alkylethersulfosuccinates, alkylamide-sulfosuccinates; alkylsulfoacetates; acylsarcosinates; and the acylglutamates, the alkyl and acyl groups of all these compounds having from 6 to 24 carbon atoms and the aryl group denoting a phenyl or benzyl group, C₆-C₂₄ alkyl esters of polyglycoside carboxylic acids such as alkyl glucoside citrates, alkyl polyglycoside tartrates and alkyl polyglycoside sulfosuccinates, alkylsulfosuccinamates, acylisethionates and N-acyltaurates, the alkyl or acyl group of all these compounds having from 12 to 20 carbon atoms, and/or acyllactylates whose acyl group contains from 8 to 20 carbon atoms and their mixtures. In some embodiments, alkyl-D-galactoside uronic acids, polyoxyalkylenated (C₆-C₂₄) ether carboxylic acids, polyoxyalkylenated (C₆-C₂₄) aryl (C₆-C₂₄) polyoxyalkylenated ether carboxylic acids, polyoxyalkylenated (C₆-C₂₄) alkyl amidoether carboxylic acids, in particular those containing from 2 to 50 ethylene oxide groups; and their alkali metal, ammonium, amine, aminoalcohol or alkaline earth metal salts can also be suitable.

[0143] Suitable C₆-C₂₄ alkyl ether sulphate salts containing from 1 to 30 ethylene oxide groups, include alkali metals or alkaline earth metals, ammonium, amine or amino alcohol salts, sodium salts and oxyethylenated (C₁₂-C₁₄) alkyl ethersulfates having an average number of ethylene oxide groups of between 1 and 4 and including sodium laureth sulfate (CTFA name) such as the commercial product sold under the name TEXAPON AOS 225 UP TEXAPON N702 TEXAPON NSW marketed by COGNIS or EMPICOL ESB3/FL2, EMPICOL ESB3/FL3, EMPICOL ESB70/FL2 sold by the company Huntsman.

[0144] Suitable amphoteric surfactants include, but are not limited to, derivatives of secondary or tertiary aliphatic amines, in which the aliphatic group is a linear or branched chain comprising from 8 to 22 carbon atoms. The amphoteric surfactants can contain at least one water-soluble anionic group such as a carboxylate, sulfonate, sulfate, phosphate or phosphonate group, (C₈-C₂₀) alkylbetaines, sulphobetaines, (C₈-C₂₀) alkylamido (C₆-C₈) alkylbetaines or (C₈-C₂₀) alkylamidoalkyl (C₆-C₈) sulfobetaines, and mixtures thereof.

[0145] Suitable amine derivatives include the products sold under the name MIRANOL®, as described in patents U.S. Pat. Nos. 2,528,378 and 2,781,354 and filed in the CTFA dictionary, 3rd edition, 1982, under the terms Amphocarboxy-glycinate and Amphocarboxypropionate denominations. Additional suitable amine derivatives include those classified in the CTFA dictionary, 5th edition, 1993, under the names cocoamphodiacetate disodium, lauroamphodiacetate disodium, caprylamphodiacetate disodium, capryloamphodiacetate disodium, cocoamphodipropionate disodium, lauroamphodipropionate disodium, caprylamphodipropionate disodium, capryloamphodipropionate disodium, acid lauroamphodipropionic, cocoamphodipropionic acid, and cocoamphodiacetate sold under the trade name MIRANOL® C2M concentrated by Rhodia. Suitable alkyl (C₈-C₂₀) betaines include cocamidopropyl betaine and cocobetaine such as the commercial products MIRATAINE BB/FLA from RHODIA or EMPIGEN BB/FL from Huntsman.

[0146] In some embodiments, the cleansing compositions or soaps described herein can be sulfate-free, and can include a sulfate-free surfactant system.

[0147] In some embodiments, the cleansing composition or soap described herein can further comprise one or more thickeners of the nonionic cellulosic compound type. Suitable cellulosic compounds include, but are not limited to, nonionic cellulose ethers, including methylcelluloses and ethylcelluloses; hydroxyalkylcelluloses such as hydroxymethylcelluloses, hydroxyethylcelluloses and hydroxypropylcelluloses; mixed hydroxyalkyl-alkylcellulose celluloses such as hydroxypropyl-methylcelluloses, hydroxyethyl-methylcelluloses, hydroxyethylethylcelluloses and hydroxybutyl-methylcelluloses and hydroxyalkylcelluloses modified with an alkyl chain. Suitable hydroxypropyl methylcelluloses include the commercial products METHOCEL E, F, J and K sold by Dow Corning and even more particularly METHOCEL E 4MQG or METHOCEL F 4M. Suitable cellulosic ingredients can be in a crystalline form, a microcrystalline form, or a mixture thereof.

[0148] In some embodiments, the cleansing composition or soap described herein can further comprise one or more additional thickeners including electrolytes such as sodium chloride, potassium chloride or potassium sulphate; alkanolamides such as cocamide DEA or cocamide MEA; esters of polyethylene glycol and monoacid or stearic acid such as polyethylene glycol distearate 6000 or mixtures thereof, polysaccharide biopolymers such as xanthan gum, guar gum, alginates, synthetic polymers such as polyacrylics such as CARBOPOL 980, CARBOPOL 1382 marketed by NOVEON, acrylate/acrylonitrile copolymers such as HYPAN SS201 marketed by KINGSTON, clays such as smectites, modified or unmodified hectorites such as BENTONE products marketed by Rheox, LAPONITE products marketed by Southern Clay Products, VEEGUM HS product marketed by RT Vanderbilt, and mixtures thereof.

[0149] In some embodiments, the cleansing composition or soap described herein can further comprise one or more nonionic surfactants. These are well-known compounds (see regard “Handbook of Surfactants” by MR PORTER, Blackie & Son editions (Glasgow and London), 1991, pp 116-178), and can be chosen from alcohols, alpha-diols, (C₁-C₂₀) alkyl phenols or polyethoxylated, polypropoxylated or polyglycerolated fatty acids, having a fatty chain comprising, for example, from 8 to 18 atoms, the number of ethylene oxide groups or propylene oxide may range from 2 to 50 and the number of glycerol groups may range from 2 to 30, copolymers of ethylene oxide and propylene, condensates of ethylene oxide and propylene oxide on fatty alcohols; polyethoxylated fatty amides having from 2 to 30 moles of ethylene oxide, polyglycerolated fatty amides comprising on average 1 to 5 glycerol groups; polyethoxylated fatty amines having 2 to 30 moles of ethylene oxide, ethoxylated sorbitan fatty acid esters having 2 to 30 moles of ethylene oxide; sucrose fatty acid esters, polyethylene glycol fatty acid esters, (C 6-C 24) alkyl polyglycosides, N-alkyl (C₆-C₂₄) glucamine derivatives, amine oxides such as that the oxides of alkyl (C₁₀-C₁₄) amines or the oxides of N-acyl (C₁₀-C₁₄)-aminopropylmorpholine, and mixtures thereof.

[0150] Additional suitable nonionic surfactants include, but are not limited to, alkyl polyglucosides (APG), maltose esters, polyglycerolated fatty alcohols, glucamine derivatives, for instance 2-ethylhexyloxycarbonyl-N-methylglucamine, and mixtures thereof. Suitable alkylpolyglucosides include those that contain an alkyl group comprising from 6 to 30 carbon atoms, and a hydrophilic group (glucoside). Exemplary alkylpolyglucosides include decylglucoside (alkyl-C9/C11-polyglucoside (1.4)), including the product sold under the name Mydol 10® by the company Kao Chemicals, the product sold under the name Plantaren 2000 UP® by the company Cognis, and the product sold under the name Oramix NS 10® by the company SEPPIC, and caprylyl/capryl glucosides, including the product sold under the name Oramix CG 110® by the company SEPPIC; laurylglucoside, sold as Plantaren 1200 N® and Plantacare 1200® by the company Cognis, and cocoglucoside, for instance the product sold under the name Plantacare 818/UP® by the company Cognis.

[0151] Suitable maltose derivatives include those described in document EP-A-566 438, such as O-octanoyl-6′-D-maltose or O-dodecanoyl-6′-D-maltose described in document FR-2 739 556.

[0152] In some embodiments, the cleansing composition or soap can be formulated in a cosmetically acceptable aqueous medium. Suitable cosmetically acceptable aqueous media can include, in addition to water, one or more solvents such as lower alcohols containing from 1 to 6 carbon atoms, such as ethanol; polyols such as glycerine; glycols such as butylene glycol, isoprene glycol, propylene glycol, polyethylene glycols such as PEG-8, sorbitol, sugars such as glucose, fructose, maltose, lactose, sucrose, and mixtures thereof. The amount of solvent(s) in the composition disclosed herein can range from 0.1 to 95% by weight.

[0153] In some embodiments, the cleansing composition or soap described herein can further comprise one or more cationic polymers of the polyquaternium type, which can provide softness and lubricity to a foaming composition. Suitable cationic polymers include Polyquaternium 5 such as the product MERQUAT 5 marketed by the company CALGON, Polyquaternium 6 such as the product SALCARE SC 30 marketed by the company CIBA, and the product MERQUAT 100 marketed by the company CALGON, Polyquaternium 7 such as the MERQUAT S, MERQUAT 2200 and MERQUAT 550 products marketed by the company CALGON, and the SALCARE SC 10 product marketed by the company CIBA, Polyquaternium 10 such as the product Polymer JR400 marketed by the company Amerchol, Polyquaternium 11 such as GAFQUAT 755, GAFQUAT 755N and GAFQUAT 734 products marketed by ISP, Polyquaternium 15 such as the product ROHAGIT KF 720 F marketed by the company ROHM, Polyquaternium 16 such as LUVIQUAT FC905, LUVIQUAT FC370, LUVIQUAT HM552 and LUVIQUAT FC550 products marketed by BASF, Polyquaternium 22 such as the product Merquat 280 sold by the company Calgon, Polyquaternium 28 such as the product STYLEZE CC10 marketed by the company ISP, Polyquaternium 39 such as the MERQUAT PLUS 3330 product marketed by Calgon, Polyquaternium 44 such as the product LUVIQUAT CARE sold by the company BASF, Polyquaternium 46 such as the product LUVIQUAT HOLD marketed by the company BASF, Polyquaternium 47 such as the product MERQUAT 2001 marketed by Calgon, and cationic guars such as the product Jaguar marketed by the company Rhodia can also be used as cationic polymer.

[0154] In some embodiments, the cleansing composition or soap described herein can further comprise one or more adjuvants or additives used in cosmetic compositions. Suitable adjuvants or additives include but are not limited to: oils, active agents, perfumes, preservatives, sequestering agents, pearlescent or opacifying agents, pigments, pearlescent agents, mineral or organic fillers such as talc, kaolin, silica powders or of polyethylene, soluble dyes, or any combination thereof.

[0155] Examples of oils include vegetable oils (jojoba, avocado, sesame, sunflower, corn, soy, safflower, grape seed), mineral oils (vaseline, isoparaffins optionally hydrogenated), synthetic oils (isopropyl myristate, cetearyl octanoate, polyisobutylene, ethyl hexyl palmitate, alkyl benzoates), volatile or non-volatile silicone oils such as polydimethylsiloxanes (PDMS) and cyclodimethylsiloxanes or cyclomethicones, and fluorinated or fluorosilicone oils and mixtures thereof.

[0156] Exemplary active agents include sunscreens, desquamating agents, moisturizing agents, depigmenting agents, pro-pigmentants, alpha-hydroxy acids, antibacterial agents, antiradical agents, anti-pollution agents, anti-inflammatories, retinoids, extracts of algae, mushrooms, vegetables, yeasts, bacteria, hydrolysed, partially hydrolyzed or unhydrolyzed proteins, enzymes, hormones, vitamins and their derivatives, flavonoids and isoflavones, and mixtures thereof.

[0157] The cleansing composition or soap described herein can have a pH ranging from 6 to 10 depending on the application chosen. The adjustment of the pH to the desired value can be done conventionally by adding a base (organic or inorganic) in the composition, for example ammonia or a primary, secondary or tertiary (poly) amine such as monoethanolamine, diethanolamine, triethanolamine, isopropanolamine or 1,3-propanediamine, or by addition of a mineral or organic acid, such as a carboxylic acid, for example, citric acid. In the context of shower gels, the pH can vary from 8 to 10.

[0158] In some embodiments, the cleansing composition described herein can further comprise optional additives such as colorants, fragrances, antibacterials, preservatives, antioxidants, beads (fragrance, exfoliating or moisturizing), mica, glitter, shea butter, shea butter beads, opacifying agents, pearlizing agents and other such ingredients. In some embodiments, the composition has high clarity (about 2 to about 25 NTU's), a targeted viscosity (about 4,000 to about 10,000 centipoise) for ease of dispensing from an orifice in the range of about 1% to about 1%8, and a yield value (about 3 to about 15 Pascals) that allows the composition to suspend a variety of additives with a uniformity of distribution and enhanced stability (for example, about 8 months at 120° F. (49° C.), and any mixture thereof.

[0159] In some embodiments, the cleansing composition or soap can further comprise one or more moisturizers/emollients. Moisturizers can be included in bar or liquid soap compositions to provide conditioning benefits to the skin. The term “moisturizer” describes a material which imparts a smooth and soft feeling to the skin surface.

[0160] There are two ways of reducing water loss from the stratum corneum. One is to deposit on the surface of the skin an occlusive layer which reduces the rate of evaporation. The second method is to add nonocclusive hygroscopic substances to the stratum corneum which will retain water, and make this water available to the stratum corneum to alter its physical properties and produce a cosmetically desirable effect. Nonocclusive moisturizers also function by improving the lubricity of the skin.

[0161] Both occlusive and nonocclusive moisturizers are contemplated for use in the compositions described herein. Exemplary moisturizers include long chain fatty acids, liquid water-soluble polyols, glycerin, propylene glycol, sorbitol, polyethylene glycol, ethoxylated/propoxylated ethers of methyl glucose (e.g., methyl gluceth-20), ethoxylated/propoxylated ethers of lanoline alcohol (e.g., Solulan-75® available from the Amerchol Co.) coconut and tallow fatty acids, liquid water-soluble polyols (e.g., glycerin, propylene glycol, butylene glycol, hexylene glycol, polypropylene glycol and polyethylene glycol).

[0162] Nonocclusive moisturizers can naturally occur in the stratum corneum of the skin, such as sodium pyrrolidone carboxylic acid, lactic acid, urea, L-proline, guanidine and pyrrolidone. Examples of other nonocclusive moisturizers include hexadecyl, myristyl, isodecyl or isopropyl esters of adipic, lactic, oleic, stearic, isostearic, myristic or linoleic acids, as well as many of their corresponding alcohol esters (sodium isostearoyl-2-lactylate, sodium capryl lactylate), hydrolyzed protein and other collagen-derived proteins, aloe vera gel and acetamide MEA (N-acetyl ethanolamine). Other examples of both occlusive and nonocclusive types of moisturizers are disclosed in “Emollients—A Critical Evaluation,” by J. Mausner, Cosmetics & Toiletries, May 1981, incorporated herein by reference.

[0163] Exemplary occlusive moisturizers include petrolatum, mineral oil, beeswax, silicones, lanolin and oil-soluble lanolin derivatives, saturated and unsaturated fatty alcohols such as behenyl alcohol, squalene and squalane, and various animal and vegetable oils such as almond oil, peanut oil, wheat germ oil, linseed oil, jojoba oil, oil of apricot pits, walnuts, palm nuts, pistachio nuts, sesame seeds, rapeseed, cade oil, corn oil, peach pit oil, poppyseed oil, pine oil, castor oil, soybean oil, avocado oil, safflower oil, coconut oil, hazelnut oil, olive oil, grape seed oil and sunflower seed oil.

### Hair Care

[0164] In some embodiments, the composition be a hair care composition comprising ingredients commonly used for hair care products. These ingredients can include, but are not limited to, cleansing agents, lathering agents, hydration agents, surfactants, detergents, gelling agents, fragrances, botanical extracts, conditioning agents, humectants, silicones or silicone derivatives, thickening agents, sun blocks, vitamins, alcohols, polyols, polyolethers, and other commonly used ingredients in shampoos, conditioners, and styling agents. Hair care products generally include one or more surfactants, one or more viscosity adjusting agents, one or more preservatives, and one or more fragrances, and any of the ingredients listed below or combinations thereof.

[0165] Generally, hair can be damaged and embrittled by the action of external atmospheric agents such as light and bad weather, but also by mechanical or chemical treatments, such as brushing, combing, dyeing, bleaching, permanent-waving and/or relaxing, and over time, hair can become dry, coarse, dull, and/or fragile. To overcome these drawbacks, it is common practice to use care compositions that condition the hair appropriately, giving it satisfactory cosmetic properties, especially in terms of smoothness, sheen, softness, suppleness, lightness, a natural feel and good disentangling properties. These hair care compositions may be, for example, shampoos, conditioning shampoos, hair conditioners, masks, sera, gels, hair lotions and creams that can be rinsed-out or leave-in compositions. In various embodiments, these compositions generally comprise a combination of cationic conditioning agents such as cationic surfactants, cationic polymers, silicones and/or fatty substances, such as fatty alcohols, in order to give the hair satisfactory cosmetic properties, in terms of softness, smoothness and suppleness. Exemplary compositions can comprise silicones, which are known to improve the cosmetic properties of hair in terms of smoothness and flexibility (as shown in U.S. Pat. No. 5,374,421, each of which is incorporated herein by reference).

[0166] In some embodiments, the hair care composition can further comprise one or more non-amino polyalkylsiloxanes, one or more oxyethylenated polymers in the presence of fatty alcohols, one or more non-amino polyalkylsiloxanes comprising at least one alkyl chain having at least 12 carbon atoms, one or more oxyethylenated polymers, and/or one or more fatty alcohols. Exemplary oxyethylenated polymers can have a weight-average molecular mass greater than or equal to 10⁶. In some embodiments, the oxyethylenated polymers can be chosen from the compounds having the formula H(OCH₂CH₂)_{z}OH, wherein, z is an integer greater than or equal to 30,000. In certain embodiments, z can range from 30,000 to 120,000, or from 40,000 to 95,000. In some embodiments, the oxyethylenated polymer can be PEG-45M (z=45,000) such as the product sold under the name Polyox WSR N 60 K by the company Amerchol, and PEG-90M (z=90000), and mixtures thereof.

[0167] In some embodiments, the hair care composition can further comprise one or more fatty alcohols. The term “fatty alcohol” means any saturated or unsaturated, linear or branched alcohol comprising at least 8 carbon atoms and which is not oxyalkylenated. Exemplary fatty alcohols are solid at room temperature (25° C.) and at atmospheric pressure (1.013*10₅ Pa). Exemplary fatty alcohols include cetyl alcohol, stearyl alcohol, oleyl alcohol, behenyl alcohol, linoleyl alcohol, palmitoleyl alcohol, arachidonyl alcohol, erucyl alcohol, cetylstearyl (or cetearyl) alcohol, and mixtures thereof.

[0168] In some embodiments, the hair care composition can further comprise one or more conditioning agents, including cationic surfactants, cationic polymers and mixtures thereof. The term “cationic surfactant” means a surfactant that is positively charged when it is contained in the composition described herein. Suitable cationic surfactants can be chosen from primary, secondary or tertiary fatty amines, optionally polyoxyalkylenated, or salts thereof, and quaternary ammonium salts, and mixtures thereof. An exemplary fatty amine is stearamidopropyl dimethylamine. Exemplary quaternary ammonium salts include tetraalkylammonium salts, including dialkyldimethylammonium or alkyltrimethylammonium salts in which the alkyl group contains approximately from 16 to 22 carbon atoms, in particular behenyltrimethylammonium, distearyldimethylammonium, cetyltrimethylammonium or benzyldimethylstearylammonium salts, or, on the other hand, the palmitylamidopropyltrimethylammonium salt, the stearamidopropyltrimethylammonium salt, the stearamidopropyldimethylcetearylammonium salt, or the stearamidopropyldimethyl(myristyl acetate)ammonium salt sold under the name CERAPHYL 70 by the company Van Dyk.

[0169] The term “cationic polymer” means any polymer containing cationic groups and/or groups that can be ionized to cationic groups, which can be non-siliceous. Exemplary cationic polymers include any known for styling the hair, for example, those described in patent application EP-A-0 337 354 and in French patent applications FR-A-2 270 846, 2 383 660, 2 598 611, 2 470 596 and 2 519 863, each of which is incorporated by reference in its entirety. Additional exemplary cationic polymers include those containing units comprising primary, secondary, tertiary and/or quaternary amine groups that may either form part of the main polymer chain or may be borne by a side substituent directly connected thereto. Suitable cationic polymers can have a weight-average molecular mass of greater than 10⁵, including polymers of polyamine, polyaminoamide and polyquaternary ammonium type, including those described in French patents 2 505 348 and 2 542 997, each of which is incorporated by reference in its entirety.

[0170] In some embodiments, the hair care composition can further comprise a “non-sulfate” cleansing agent, lathering agent, or surfactant agent. Suitable “non-sulfate” agents include but are not limited to: sodium lauroyl methyl isethionate propanediol, sodium methyl oleoyl taurate, and sodium cocoyl isethionate.

[0171] In some embodiments, the hair care composition can further comprise any of the following ingredients or mixtures thereof: quaternary ammonium compound synthetically derived from rapeseed, quaternary polymers of vinylpyrrolidone and/or of vinylimidazole, for instance the products sold under the names LUVIQUAT FC 905, FC 550 and FC 370 and LUVIQUAT Excellence by the company BASF, Cationic polysaccharides, including cationic celluloses, including cellulose ether derivatives comprising quaternary ammonium groups, cationic cellulose copolymers or cellulose derivatives grafted with a water-soluble quaternary ammonium monomer, and cationic galactomannan gums. Exemplary cellulose ether derivatives comprising quaternary ammonium groups are described in French patent 1 492 597. These polymers are also defined in the CTFA dictionary as quaternary ammoniums of hydroxyethylcellulose that have reacted with an epoxide substituted with a trimethylammonium group. Cationic cellulose copolymers or the cellulose derivatives grafted with a water-soluble quaternary ammonium monomer are described in U.S. Pat. No. 4,131,576, such as hydroxyalkyl celluloses, for instance hydroxymethyl, hydroxyethyl or hydroxypropyl celluloses grafted especially with a methacryloylethyltrimethylammonium, methacrylamidopropyltrimethylammonium or dimethyldiallylammonium salt. Suitable associative celluloses such as alkylhydroxyethylcelluloses quaternized with C₈-C₃₀ fatty chains, such as the product QUATRISOFT LM 200, sold by the company Amerchol/Dow Chemical (INCI name Polyquaternium-24) and the products CRODACEL QM (INCI name PG-Hydroxyethylcellulose cocodimonium chloride), CRODACEL QL (C₁₂ alkyl) (INCI name PG-Hydroxyethylcellulose lauryldimonium chloride) and CRODACEL QS (Cis alkyl) (INCI name PG-Hydroxyethylcellulose stearyldimonium chloride) sold by the company Croda. Other suitable fatty-chain hydroxyethylcellulose derivatives include the commercial products SOFTCAT Polymer SL such as SL-100, SL-60, SL-30 and SL-5 from the company Amerchol/Dow chemical of INCI name Polyquaternium-67. Suitable cationic galactomannan gums are described in U.S. Pat. No. 3,589,578 and 4 031 307. Suitable cellulosic ingredients can be in a crystalline form, a microcrystalline form, or a mixture thereof.

[0172] In some embodiments, the hair care composition can further comprise one or more cationic proteins or cationic protein hydrolysates, polyalkyleneimines, including polyethyleneimines, polymers containing vinylpyridine or vinylpyridinium units, condensates of polyamines and of epichlorohydrin, quaternary polyureylenes and chitin derivatives, animal protein hydrolysates bearing trimethylbenzylammonium groups, such as the products sold under the name Crotein BTA by the company Croda and referred to in the CTFA dictionary as Benzyltrimonium hydrolyzed animal protein, protein hydrolysates bearing quaternary ammonium groups on the polypeptide chain, the said ammonium groups comprising at least one alkyl radical having from 1 to 18 carbon atoms.

[0173] In some embodiments, the hair care composition can further comprise one or more quaternized plant proteins such as from wheat, corn or soybean proteins, for example, quaternized wheat proteins, including those sold by the company Croda under the names Hydrotriticum WQ or QM, referred to in the CTFA dictionary as Cocodimonium hydrolysed wheat protein, Hydrotriticum QL, referred to in the CTFA dictionary as Laurdimonium hydrolysed wheat protein, or else Hydrotriticum QS, referred to in the CTFA dictionary as Steardimonium hydrolysed wheat protein.

[0174] In some embodiments, the hair care composition can further comprise one or more polyamines such as POLYQUART R H sold by Cognis, referred to under the name polyethylene glycol tallow polyamine in the CTFA dictionary. Additional suitable polymers include those sold especially under the name Lupamin by the company BASF, and the products sold under the names Lupamin 9095, Lupamin 5095, Lupamin 1095, Lupamin 9030 and Lupamin 9010.

[0175] In some embodiments, the hair care composition can further comprise one or more fatty substances that are liquid at room temperature (25° C.) and at atmospheric pressure (1.013*10⁵ Pa). The term “fatty substance” means an organic compound that is insoluble in water at ordinary temperature (25° C.) and at atmospheric pressure (1.013*10⁵ Pa) (solubility of less than 5%, less than 1%, or less than 0.1%). Fatty substances are generally soluble in organic solvents under the same temperature and pressure conditions, for example, in chloroform, dichloromethane, carbon tetrachloride, ethanol, benzene, toluene, tetrahydrofuran (THF), liquid petroleum jelly or decamethylcyclopentasiloxane. The liquid fatty substances of the present disclosure can be nonpolyoxyethylenated and nonpolyglycerolated. The term “oil” means a “fatty substance” that is liquid at room temperature (25° C.) and at atmospheric pressure (1.013*10⁵ Pa). The term “non-silicone oil” means an oil not containing any silicon atoms (Si) and the term “silicone oil” means an oil containing at least one silicon atom. The liquid fatty substances can be chosen from non-silicone oils such as in particular C₆-C₁₆ liquid hydrocarbons, liquid hydrocarbons containing more than 16 carbon atoms, non-silicone oils of animal origin, triglycerides of plant or synthetic origin, fluoro oils, liquid fatty acid and/or fatty alcohol esters other than triglycerides, and mixtures thereof. The liquid hydrocarbons can be linear, branched or optionally cyclic, including hexane, cyclohexane, undecane, dodecane, tridecane or isoparaffins, such as isohexadecane, isodecane or isododecane, and mixtures thereof. Suitable linear or branched liquid hydrocarbons of mineral or synthetic origin containing more than 16 carbon atoms can be chosen from liquid paraffins, petroleum jelly, liquid petroleum jelly, mineral oil, polydecenes and hydrogenated polyisobutene such as PARLEAM and mixtures thereof hydrocarbon-based oils of animal origin, such as perhydrosqualene, can be used.

[0176] Exemplary triglycerides of vegetable or synthetic origin can be chosen from liquid fatty acid triglycerides comprising from 6 to 30 carbon atoms, for instance heptanoic or octanoic acid triglycerides, or alternatively, more particularly from those present in plant oils, for instance coconut oil, sunflower oil, corn oil, soybean oil, marrow oil, grapeseed oil, sesame seed oil, hazelnut oil, apricot oil, macadamia oil, arara oil, castor oil, avocado oil, jojoba oil, shea butter oil or synthetic caprylic/capric acid triglycerides, such as those sold by the company Stearineries Dubois or those sold under the names MIGLYOL 810, 812 and 818 by the company Dynamit Nobel, and mixtures thereof. Suitable fluoro oils include perfluoromethylcyclopentane and perfluoro-1,3-dimethylcyclohexane, such as FLUTEC PCl and FLUTEC PC3 by the company BNFL Fluorochemicals; perfluoro-1,2-dimethylcyclobutane; perfluoroalkanes such as dodecafluoropentane and tetradecafluorohexane, sold under the names PF 5050 and PF 5060 by the company 3M, or bromoperfluorooctyl sold under the name FORALKYL by the company Atochem; nonafluoromethoxybutane and nonafluoroethoxyisobutane; perfluoromorpholine derivatives such as 4-trifluoromethyl perfluoromorpholine sold under the name PF 5052 by the company 3M.

[0177] Suitable monoesters include dihydroabietyl behenate; octyldodecyl behenate; isocetyl behenate; cetyl lactate; C₁₂-C₁₅ alkyl lactate; isostearyl lactate; lauryl lactate; linoleyl lactate; oleyl lactate; (iso)stearyl octanoate; isocetyl octanoate; octyl octanoate; cetyl octanoate; decyl oleate; isocetyl isostearate; isocetyl laurate; isocetyl stearate; isodecyl octanoate; isodecyl oleate; isononyl isononanoate; isostearyl palmitate; methyl acetyl ricinoleate; myristyl stearate; octyl isononanoate; 2-ethylhexyl isononate; octyl palmitate; octyl pelargonate; octyl stearate; octyldodecyl erucate; oleyl erucate; ethyl and isopropyl palmitates; 2-ethylhexyl palmitate, 2-octyldecyl palmitate, alkyl myristates such as isopropyl, butyl, cetyl, 2-octyldodecyl, myristyl or stearyl myristate, hexyl stearate, butyl stearate, isobutyl stearate; dioctyl malate, hexyl laurate, 2-hexyldecyl laurate, and mixtures thereof.

[0178] In some embodiments, the hair care composition can further comprise diethyl sebacate, diisopropyl sebacate, diisopropyl adipate, di(n-propyl) adipate, dioctyl adipate, diisostearyl adipate, dioctyl maleate, glyceryl undecylenate, octyldodecyl stearoyl stearate, pentaerythrityl monoricinoleate, pentaerythrityl tetraisononanoate, pentaerythrityl tetrapelargonate, pentaerythrityl tetraisostearate, pentaerythrityl tetraoctanoate, propylene glycol dicaprylate, propylene glycol dicaprate, tridecyl erucate, triisopropyl citrate, triisostearyl citrate, glyceryl trilactate, glyceryl trioctanoate, trioctyldodecyl citrate, trioleyl citrate, propylene glycol dioctanoate, neopentyl glycol diheptanoate, diethylene glycol diisononanoate, and polyethylene glycol distearates, and mixtures thereof.

[0179] In some embodiments, the hair care composition can further comprise one or more fatty esters, one or more sugar esters, and/or one or more diesters of C₆-C₃₀, such as C₁₂-C₂₂ fatty acids. The term “sugar” means oxygen-bearing hydrocarbon-based compounds containing several alcohol functions, with or without aldehyde or ketone functions, and which comprise at least 4 carbon atoms. Suitables sugars can include monosaccharides, oligosaccharides or polysaccharides, for example, sucrose (or saccharose), glucose, galactose, ribose, fucose, maltose, fructose, mannose, arabinose, xylose and lactose, and derivatives thereof, such as alkyl derivatives, such as methyl derivatives, for instance methylglucose. Suitable esters can include oleates, laurates, palmitates, myristates, behenates, cocoates, stearates, linoleates, linolenates, caprates, arachidonates or mixtures thereof, such as, oleate/palmitate, oleate/stearate or palmitate/stearate mixed esters. Suitable monoesters and diesters also include mono- or di-oleate, -stearate, -behenate, -oleopalmitate, -linoleate, -linolenate or -oleostearate of sucrose, of glucose or of methylglucose, including the product sold under the name GLUCATE DO by the company Amerchol, which is a methylglucose dioleate. Additional exemplary esters or mixtures of esters of sugar and of fatty acid that may also be mentioned include: the products sold under the names F160, F140, F 110, F90, F70 and SL40 by the company Crodesta, respectively denoting sucrose palmitate/stearates formed from 73% monoester and 27% diester and triester, from 61% monoester and 39% diester, triester and tetraester, from 52% monoester and 48% diester, triester and tetraester, from 45% monoester and 55% diester, triester and tetraester, from 39% monoester and 61% diester, triester and tetraester, and sucrose mono laurate; the products sold under the name Ryoto Sugar Esters, for example reference B370 and corresponding to sucrose behenate formed from 20% monoester and 80% diester-triester-polyester; the sucrose mono-dipalmitate/stearate sold by the company Goldschmidt under the name TEGOSOFT PSE.

[0180] In some embodiments, the hair care composition can further comprise a pH modifying agent such as citric acid and/or sodium hydroxide. Any commonly used pH-modifying agent for hair care compositions is contemplated for use herein.

[0181] In various embodiments, the hair care composition can further comprise any of the following ingredients, and/or mixtures thereof: sodium lauroyl methyl isethionate (a cleansing and lathering agent), liquid fatty substances including silicone oils different from the non-amino polyalkylsiloxanes discussed above herein, and organomodified polysiloxanes comprising at least one functional group chosen from amino groups, aryl groups and alkoxy groups. Organopolysiloxanes are defined in greater detail in Walter Noll's Chemistry and Technology of Silicones (1968), Academic Press, the entirety of which is hereby incorporated by reference. They may be volatile or non-volatile. Suitable cyclic polydialkylsiloxanes include octamethylcyclotetrasiloxane sold under the name VOLATILE SILICONE 7207 by Union Carbide or SILBIONE 70045 V2 by Rhodia, decamethylcyclopentasiloxane sold under the name VOLATILE SILICONE 7158 by Union Carbide, and SILBIONE 70045 V5 by Rhodia, and mixtures thereof. Cyclocopolymers of the dimethylsiloxane/methylalkylsiloxane type, such as VOLATILE SILICONE FZ 3109 sold by the company Union Carbide are also suitable. Exemplary cyclic polydialkylsiloxanes with organosilicon compounds include octamethylcyclotetrasiloxane and tetra(trimethylsilyl)pentaerythritol (50/50) and the mixture of octamethylcyclotetrasiloxane and oxy-1,1′-bis(2,2,2′,2′,3,3′-hexatrimethylsilyloxy)neopentane, linear volatile polydialkylsiloxanes such as those sold under the name SH 200 by the company Toray Silicone. Silicones coming within this category are also described in the paper published in Cosmetics and Toiletries, Vol. 91, January 76, pp. 27-32, Todd & Byers, “Volatile Silicone Fluids for Cosmetics,” which is incorporated by reference herein.

[0182] Exemplary suitable non-volatile polydialkylsiloxanes include polydimethylsiloxanes having trimethylsilyl end groups such as the SILBIONE oils of the 47 and 70 047 series or the MIRASIL oils sold by Rhodia, such as, for example, the oil 70 047 V 500 000; the oils of the MIRASIL series sold by Rhodia; the oils of the 200 series from the company Dow Corning, such as DC200 with a viscosity of 60 000 mm²/s; the VISCASIL oils from General Electric and certain oils of the SF series (SF 96, SF 18) from General Electric, the polydimethylsiloxanes having dimethylsilanol end groups known under the name dimethiconol (CTFA), such as the oils of series 48 from the company Rhodia.

[0183] Exemplary organomodified silicones include polyalkylarylsiloxanes, and products sold under the following names: SILBIONE oils of the 70 641 series from Rhodia; the oils of the RHODORSIL 70 633 and 763 series from Rhodia; the oil Dow Corning 556 Cosmetic Grade Fluid from Dow Corning; the silicones of the PK series from Bayer, such as the product PK20; the silicones of the PN and PH series from Bayer, such as the products PN1000 and PH1000, certain oils of the SF series from General Electric, such as SF 1023, SF 1154, SF 1250 and SF 1265, the products sold under the names GP 4 Silicone Fluid and GP 7100 by Genesee or the products sold under the names Q2 8220 and Dow Corning 929 or 939 by the company Dow Corning.

[0184] In various embodiments, the hair care composition can further comprise one or more additional surfactants different from the cationic surfactants described above, including anionic surfactants, amphoteric or zwitterionic surfactants, nonionic surfactants and mixtures thereof. Exemplary anionic surfactants include alkyl sulfates, alkyl ether sulfates, alkylamido ether sulfates, alkylarylpolyether sulfates, monoglyceride sulfates, alkylsulfonates, alkylamidesulfonates, alkylarylsulfonates, α-olefin sulfonates, paraffin sulfonates, alkylsulfosuccinates, alkylether sulfosuccinates, alkylamide sulfo succinates, alkylsulfoacetates, acylsarcosinates, acylglutamates, alkylsulfosuccinamates, acylisethionates and N—(C₁-C₄)alkyl N-acyltaurates, salts of alkyl monoesters and of polyglycoside-polycarboxylic acids, acyllactylates, D-galactoside uronic acid salts, alkyl ether carboxylic acid salts, alkylaryl ether carboxylic acid salts, alkylamido ether carboxylic acid salts; and the corresponding non-salified forms of all these compounds; the alkyl and acyl groups of all these compounds (unless otherwise mentioned) generally comprising from 6 to 24 carbon atoms and the aryl group generally denoting a phenyl group. Anionic surfactants in salt form can include alkali metal salts such as the sodium or potassium salt, the sodium salt, ammonium salts, amine salts and amino alcohol salts or alkaline-earth metal salts such as the magnesium salt. Exemplary amino alcohol salts include monoethanolamine, diethanolamine and triethanolamine salts, monoisopropanolamine, diisopropanolamine or triisopropanolamine salts, 2-amino-2-methyl-1-propanol salts, 2-amino-2-methyl-1,3-propanediol salts and tris(hydroxymethyl)aminomethane salts.

[0185] Suitable anionic surfactants also include mild anionic surfactants, i.e. anionic surfactants without a sulfate function, including polyoxyalkylenated alkyl ether carboxylic acids; polyoxyalkylenated alkylaryl ether carboxylic acids; polyoxyalkylenated alkylamido ether carboxylic acids, in particular those comprising 2 to 50 ethylene oxide groups; alkyl-D-galactoside uronic acids; acylsarcosinates, acylglutamates; and alkylpolyglycoside carboxylic esters such as those sold under the name AKYPO RLM 45 CA from Kao.

[0186] Exemplary suitable amphoteric or zwitterionic surfactant(s) can be secondary or tertiary aliphatic amine derivatives, optionally quaternized, in which the aliphatic group is a linear or branched chain containing from 8 to 22 carbon atoms, where the amine derivatives contain at least one anionic group, for example a carboxylate, sulfonate, sulfate, phosphate or phosphonate group, such as (C₈-C₂₀)alkylbetaines, sulfobetaines, (C₈-C₂₀)alkylamido(C₃-C₈)alkylbetaines or (C₈-C₂₀)alkylamido(C₆-C₈)alkylsulfobetaines. Any suitable secondary or tertiary aliphatic amine derivative can be present in coconut oil or in hydrolysed linseed oil, or the like. Representative compounds are classified in the CTFA dictionary, 5th edition, 1993, under the names disodium cocoamphodiacetate, disodium lauroamphodiacetate, disodium caprylamphodiacetate, disodium capryloamphodiacetate, disodium cocoamphodipropionate, disodium lauroamphodipropionate, disodium caprylamphodipropionate, disodium capryloamphodipropionate, lauroamphodipropionic acid, and cocoamphodipropionic acid.

[0187] By way of example, the cocoamphodiacetate sold by the company Rhodia under the trade name MIRANOL C2M Concentrate, and sodium diethylaminopropyl cocoaspartamide and sold by the company Chimex under the name Chimexane HB are suitable for use in the disclosed compositions.

[0188] Suitable nonionic surfactants are described in the Handbook of Surfactants by M. R. Porter, published by Blackie & Son (Glasgow and London), 1991, pp. 116-178, and include fatty alcohols, fatty α-diols, fatty (C₁-C₂₀)alkylphenols and fatty acids, which can be ethoxylated, propoxylated or glycerolated and contain at least one fatty chain comprising from 8 to 18 carbon atoms, the number of ethylene oxide or propylene oxide groups ranging from 1 to 200, and the number of glycerol groups ranging from 1 to 30. Condensates of ethylene oxide and of propylene oxide with fatty alcohols, ethoxylated fatty amides having from 1 to 30 ethylene oxide units, polyglycerolated fatty amides comprising on average from 1 to 5 glycerol groups, and in particular from 1.5 to 4, ethoxylated fatty acid esters of sorbitan containing from 1 to 30 ethylene oxide units, fatty acid esters of sucrose, fatty acid esters of polyethylene glycol, (C₆-C₂₄)alkylpolyglycosides, oxyethylenated plant oils, N—(C₆-C₂₄)alkylglucamine derivatives, amine oxides such as (C₁₀-C₁₄)alkylamine oxides or N—(C₁₀-C₁₄)acylaminopropylmorpholine oxides are also suitable for use in the compositions disclosed herein.

[0189] Additional suitable nonionic surfactants include alkyl polyglucosides (APG), maltose esters, polyglycerolated fatty alcohols, glucamine derivatives, for instance 2-ethylhexyloxycarbonyl-N-methylglucamine, and mixtures thereof. Alkylpolyglucosides that are those containing an alkyl group comprising from 6 to 30 carbon atoms, and containing a hydrophilic group (glucoside). Exemplary alkylpolyglucosides include decylglucoside (alkyl-C9/C11-polyglucoside (1.4)), including the product sold under the name Mydol 10® by the company Kao Chemicals, the product sold under the name Plantaren 2000 UP® by the company Cognis, and the product sold under the name Oramix NS 10® by the company SEPPIC, and caprylyl/capryl glucosides, including the product sold under the name Oramix CG 110® by the company SEPPIC; laurylglucoside, sold as Plantaren 1200 N® and Plantacare 1200® by the company Cognis, and cocoglucoside, for instance the product sold under the name Plantacare 818/UP® by the company Cognis.

[0190] Suitable maltose derivatives include those described in document EP-A-566 438, such as O-octanoyl-6′-D-maltose or O-dodecanoyl-6′-D-maltose described in document FR-2 739 556. Each of these documents is incorporated by reference in its entirety.

[0191] In some embodiments, the hair care composition can be formulated in a cosmetically acceptable medium. The term “cosmetically acceptable medium” means a medium that is compatible with human keratin fibers, such as the hair. A cosmetically acceptable medium can be formed from water or from a mixture of water and one or more cosmetically acceptable solvents chosen from lower alcohols, such as ethanol and isopropanol; polyols and polyol ethers, including 2-butoxyethanol, propylene glycol, propylene glycol monomethyl ether, diethylene glycol monoethyl ether and monomethyl ether, and mixtures thereof.

[0192] In some embodiments, the hair care composition can further comprise any of the following additives, or mixtures thereof: solid fatty substances different from fatty alcohols such as waxes, anionic, nonionic or amphoteric polymers or mixtures thereof, antidandruff agents, anti-seborrhoea agents, agents for preventing hair loss and/or for promoting hair regrowth, vitamins and provitamins including panthenol, sunscreens, mineral or organic pigments, sequestrants, plasticizers, solubilizers, acidifying agents, mineral or organic thickeners, especially polymeric thickeners different from oxyethylenated polymers, opacifiers or nacreous agents, antioxidants, hydroxy acids, fragrances and/or preserving agents.

### Nail Care

[0193] In some embodiments, the cosmetic composition can comprise ingredients commonly used in nail care products. Nail care products include, but are not limited to, nail treatments including nail strengtheners, top coats, and base coats, nail polishes, nail polish removers, hands skincare, feet skincare, drying agents, and corrector pens including nail polish removers.

[0194] In some embodiments, the nail care composition can be a nail treatment composition. A nail treatment composition can comprise a composition for treating ingrown nails or nail deformities, a composition for topical treatment of nail infections, including fungal infections, nail strengtheners, top coats, base coats, polish removers, or any combination thereof. In some embodiments, a nail treatment composition can be formulated as a topical nail lacquer or polish, creams, solutions, suspensions, lotions, serums, gels, balms, gels, oils, oil in creams, and/or scrubs for treating the hands and/or the feet.

[0195] In some embodiments, the nail treatment composition can be nail strengthener. Nail strengtheners can treat fingernails and toenails to both harden, strengthen, and promote growth of the nails, to prevent or minimize breaking, cracking, splitting and peeling, and can comprise any known composition used to prevent and heal quarter cracks while increasing the growth of horse hooves, which have a similar protein consistency to human fingernails and toenails, including: lanolin, butter, beeswax, rosin, copper acetate, and turpentine. In some embodiments, the nail treatment composition can further comprise titanium Dioxide for example, TI-PURE R900 from E.I. DuPont.

[0196] In some embodiments, the nail treatment composition can be a base coat. In some embodiments, a base coat can be a liquid composition comprising at least one polymer which provides adhesion, for example a polymer co-polymerized from methyl methacrylate (MMA) and methacrylic acid (MAA) to form a polymer composed of polymethyl methacrylate (PMMA) and polymethacrylic acid (PMAA), in which the MAA monomer fraction may vary from 0 to 100%. In some embodiments, suitable polymers for use as a base coat include hydroxyethylmethacrylate (HEMA), hydroxypropylmethacrylate (HPMA), ethyl methacrylate (EMA), tetrahydrofurfuryl methacrylate (THFMA), pyromellitic dianhydride di(meth)acrylate, pyromellitic dianhydride glyceryl dimethacrylate, pyromellitic dimethacrylate, methacroyloxyethyl maleate, 2-hydroxyethyl methacrylate/succinate, 1,3-glycerol dimethacrylate/succinate adduct, phthalic acid monoethyl methacrylate, and mixtures thereof. In some aspects, a base coat can further comprise a non-reactive, solvent-dissolvable, film-forming polymer such as a cellulose ester, for example cellulose acetate alkylate, cellulose acetate butyrate, or cellulose acetate propionate. The above exemplary ingredients are not limiting.

[0197] In some embodiments, the nail treatment composition can be a top coat, for example a quick drying top coat. Top coats can include a base resin which is cellulose acetate butyrate, a film former which is a methacrylate polymer, thermally curable or photocurable monomers which are monofunctional methacrylates and cross-linkers (i.e., difunctional and trifunctional methacrylates), a thermal initiator or photoinitiator(s) together in a solution of aliphatic esters and alcohol, and a photoreactive coating. Suitable solvents include acetates and alcohols, particularly ethyl acetate, butyl acetate, and isopropyl alcohol. The photoreactive coating can include photoreactive monomers including methacrylate monomers such as: cyclohexyl methacrylate, n-decyl methacrylate, 2-ethyl hexyl methacrylate, ethyl methacrylate, hydroxy propyl methacrylate, isobornyl methacrylate, 2-methoxy ethyl methacrylate; difunctional and trifunctional methacrylate monomers, cross-linking agents such as diurethane dimethacrylate, ethylene glycol dimethacrylate, 1,10 decanediol dimethacrylate, 1,6-hexanediol dimethacrylate, and trimethylolpropane trimethacrylate. Commercially available photoinitiators suitable for use include but are not limited to: benzoin methyl ether, 2-hydroxy-2-methyl-1-phenyl-1-propanone (“Darocur 1173”), diethoxyacetophenone, and benzyl diketal. Photoinitiators are oligomeric mixtures of phenyl propanones such as a mixture of 2,4,6-trimethylbenzophenone and 4-methylbenzophenone and a mixture of oligo-[2-hydroxy-2-methyl-1[4-(1-methylvinyl)phenyl]propanone] and 2-hydroxy-2-methyl-phenyl propanone that are sold by Sartomer under the names “Esacure KIP 100F” and “Esacure TZT Photoinitiator.”

[0198] In some embodiments, the nail care composition can be a nail polish or nail enamel composition. In some embodiments, the nail polish or nail enamel composition can further comprise a nitrocellulose film former, a latex film former, a polycarbodiimide film former, a low volatile organic compound (VOC), and polycarbodiimide film formers. Polycarbodiimides can include polymers with a plurality of carbodiimide groups appended to the polymer backbone. For example, U.S. Pat. No. 5,352,400 (the disclosure of which is incorporated by reference herein) discloses polymers and co-polymers derived from alpha-methylstyryl-isocyanates. Suitable polycarbodiimide compounds include, but are not limited to, those commercially sold by the suppliers Nisshinbo (including those known by the name under the CARBODILITE series, V-02, V02-L2, SV-02, E-02, V-10, SW-12G, E-03A), Picassian, and 3M.

[0199] In some embodiments, the nail polish or nail enamel composition can further comprise one or more latex polymers, including carboxyl functional acrylate latex polymers, carboxyl functional polyurethane latex polymers, carboxyl functional silicone latex polymers, carboxyl functional non-acrylate latex polymers and mixtures thereof. In various embodiments, suitable latex polymers can be film-forming latex polymers or non film-forming latex polymers. In some embodiments, the latex polymers can be carboxyl functional acrylate latex polymers, such as those resulting from the homopolymerization or copolymerization of ethylenically unsaturated monomers chosen from vinyl monomers, (meth)acrylic monomers, (meth)acrylamide monomers, mono- and dicarboxylic unsaturated acids, esters of (meth)acrylic monomers, and amides of (meth)acrylic monomers The term “(meth)acryl” and variations thereof, as used herein, means acryl or methacryl. The (meth)acrylic monomers may be chosen from, for example, acrylic acid, methacrylic acid, citraconic acid, itaconic acid, maleic acid, fumaric acid, crotonic acid, and maleic anhydride. The esters of (meth)acrylic monomers may be, by way of non-limiting example, C1-C8 alkyl (meth)acrylates such as methyl (meth)acrylate, ethyl (meth)acrylate, propyl (meth)acrylate, isopropyl (meth)acrylate, butyl (meth)acrylate, tert-butyl (meth)acrylate, pentyl(meth)acrylate, isopentyl (meth)acrylate, neopentyl (meth)acrylate, hexyl (meth)acrylate, isohexyl (meth)acrylate, 2-ethylhexyl (meth)acrylate, cyclohexyl (meth)acrylate, isohexyl (meth)acrylate, heptyl (meth)acrylate, isoheptyl (meth)acrylate, octyl (meth)acrylate, isooctyl (meth)acrylate, allyl (meth)acrylate, and combinations thereof. The amides of (meth)acrylic monomers can, for example, be made of (meth)acrylamides, and especially N-alkyl (meth)acrylamides, in particular N—(C1-C12) alkyl (meth)acrylates such as N-ethyl (meth)acrylamide, N-t-butyl (meth)acrylamide, N-t-octyl (meth)acrylamide, N-methylol (meth)acrylamide and N-diacetone (meth)acrylamide, and any combination thereof.

[0200] The vinyl monomers can include, but are not limited to, vinyl cyanide compounds such as acrylonitrile and methacrylonitrile; vinyl esters such as vinyl formate, vinyl acetate, vinyl propionate, vinyl neodecanoate, vinyl pivalate, vinyl benzoate and vinyl t-butyl benzoate, triallyl cyanurate; vinyl halides such as vinyl chloride and vinylidene chloride; aromatic mono- or divinyl compounds such as styrene, .alpha.-methylstyrene, chlorostyrene, alkylstyrene, divinylbenzene and diallyl phthalate, as well as para-styrensulfonic, vinylsulfonic, 2-(meth)acryloyloxyethylsulfonic, 2-(meth)acrylamido-2-methylpropylsulfonic acids, and mixtures thereof.

[0201] The list of monomers herein is not limiting, and it should be understood that it is possible to use any monomer known to those skilled in the art which includes acrylic and/or vinyl monomers (including monomers modified with a silicone chain).

[0202] In some non-limiting exemplary embodiments, carboxyl functional acrylate latex polymers can be chosen from aqueous dispersions of Methacrylic Acid/Ethyl Acrylate copolymer (INCI: Acrylates Copolymer, such as LUVIFLEX SOFT by BASF), PEG/PPG-23/6 Dimethicone Citraconate/C10-30 Alkyl PEG-25 Methacrylate/Acrylic Acid/Methacrylic Acid/Ethyl Acrylate/Trimethylolpropane PEG-15 Triacrylate copolymer (INCI: Polyacrylate-2 Crosspolymer, such as Fixate Superhold™ by Lubrizol), Styrene/Acrylic copolymer (such as Acudyne Shine by Dow Chemical), Ethylhexyl Acrylate/Methyl Methacrylate/Butyl Acrylate/Acrylic Acid/Methacrylic Acid copolymer (INCI: Acrylates/Ethylhexyl Acrylate Copolymer, such as Daitosol 5000SJ, Daito Kasei Kogyo), Acrylic/Acrylates Copolymer (INCI name: Acrylates Copolymer, such as Daitosol 5000AD, Daito Kasei Kogyo), Acrylates Copolymers, such as those known under the tradenameDermacryl AQF (Akzo Nobel), under the tradename LUVIMER MAE (BASF), or under the tradename BALANCE CR (AKZO NOBEL), Acrylates/Hydroxyesters Acrylates Copolymer, known under the tradename ACUDYNE 180 POLYMER (Dow Chemical), Styrene/Acrylates Copolymer, known under the tradename Acudyne Bold from Dow Chemical, Styrene/Acrylates/Ammonium Methacrylate Copolymer, known under the tradename SYNTRAN PC5620 CG from Interpolymer, and mixtures thereof.

[0203] In some embodiments, the nail care composition can comprise a nail polish remover. Nail polish removers can include a polyhydric alcohol compound including glycerin, glycols, polyglycerin, esters of polyhydric alcohols, and mixtures thereof. The glycol can contain from 2 to 12 carbon atoms, such as, for example, glycerin, propylene glycol, butylene glycol, propane diol, hexylene glycol, polyglycerin, dipropylene glycol and diethylene glycol. Suitable esters of polyhydric alcohol include liquid esters of saturated or unsaturated, linear or branched C1-C26 polyhydric alcohols. Examples of suitable esters of polyhydric alcohol include, but are not limited to, esters of dihydroxy, trihydroxy, tetrahydroxy or pentahydroxy alcohols. The ester of polyhydric alcohol may be a glyceryl ester such as, glyceryl triglycolate, glyceryl tricitrate, glyceryl trilactate, glyceryl trilactate, glyceryl tributanoate, glyceryl triheptanoate, glyceryl trioctanoate, etc.

[0204] A nail polish remover can further comprise a low carbon alcohol, a containing from 1 to 8 carbon atoms. The low carbon alcohol may contain from 2 to 6 carbon atoms, such as from 2 to 5 carbon atoms. Examples of low carbon alcohols include, but are not limited to, ethanol, propanol, butanol, pentanol, isopropanol, isobutanol, and isopentanol. A nail polish remover can further comprise a high boiling point ester compound including, but are not limited to, carbonate esters, adipates, sebacates and succinates. Exemplary high boiling point ester compounds include, but are not limited to, alkylene carbonates such as propylene carbonate, dimethyl succinate, diethyl succinate, dimethyl glutarate, diethyl glutarate, dimethyl sebacate, diethyl sebacate, diisopropyl sebacate, bis(2-ethylhexyl) sebacate, dimethyl adipate, diisopropyl adipate, di-n-propyl adipate, dioctyl adipate, bis(2-ethylhexyl) adipate, diisostearyl adipate, ethyl maleate, bis(2-ethylhexyl) maleate, triisopropyl citrate, triisocetyl citrate, triisostearyl citrate, trioctyldodecyl citrate and trioleyl citrate.

[0205] A nail polish remover can further comprise a thickening agent including but not limited to: nonionic, anionic, cationic, amphiphilic, and amphoteric polymers, and other known rheology modifiers, such as cellulose-based thickeners such as hydroxyethylcellulose, hydroxypropylcellulose, methylcellulose, and ethylhydroxyethylcellulose. Certain notable cellulose derivatives include hydroxyl-modified cellulose polymers such as Hydroxyethylcellulose, e.g., those having a molecular weight over 500,000 daltons such as NATROSOL 250 HHR and Hydroxypropyl cellulose, e.g., KLUCEL MF—both available from Ashland of Covington, Ky. The thickening agent can be a polysaccharide such as fructans, glucans, galactans and mannans or heteropolysaccharides such as hemicellulose, pullulan or branched polysaccharides such as gum arabic and amylopectin, or mixed polysaccharides such as starch. The thickening agent can be an acrylic thickening agent (acrylic thickener) or an acrylamide thickening agent (acrylamide thickener). The thickening agent can comprise at least one monomer performing a weak acid function such as acrylic acid, methacrylic acid, itaconic acid, crotonic acid, maleic acid and/or fumaric acid. The thickening agent can comprise a monomer performing a strong acid function such as monomers having a function of the sulfonic acid type or phosphonic acid type, such as 2-acrylamido-2-methylpropane sulfonic acid (AMPS). The thickening agent can comprise a crosslinking agent such as methylene bisacrylamide (MBA), ethylene glycol diacrylate, polyethylene glycol dimethacrylate, diacrylamide, cyanomethacrylate, vi nyloxyethacrylate or methacrylate, formaldehyde, glyoxal, and compositions of the glycidylether type such as ethyleneglycol diglycidylether, or epoxides. Suitable acrylic thickeners are disclosed in U.S. patent application publication nos. 2004/0028637 and 2008/0196174, both of which are incorporated herein by reference. In some embodiments, the thickening agent can comprise an organoclay (hydrophobically treated clay) or a hydrophilic clay.

[0206] In some embodiments, the thickening agent can comprise an abrasive compound (abrasive system). An “abrasive compound” is a compound capable of providing abrasion or mechanical exfoliation. The abrasive particles can comprise perlite, pumice, zeolites, hydrated silica, calcium carbonate, dicalcium phosphate dihydrate, calcium pyrophosphate, alumina, sodium bicarbonate, polylactic acid, as well as synthetic polymeric materials such as polyethylene, polypropylene, polyethylene terephthalate, polymethyl methacrylate or nylon. In certain embodiments a moderately hard abrasive includes perlite, such as a cosmetic grade perlite available from Imerys under the name IMERCARE 270P-Scrub. In certain embodiments a soft abrasive is a sugar, a ground fruit kernel or shell powders such as apricot kernel, coconut husk, or spherical waxes (for example, carnauba jojoba); argan shell powder, and the like.

[0207] In some embodiments, the nail care composition can further comprise an additive commonly used in cosmetic compositions and known to a person skilled include solvents, preservatives, fragrances, oils, waxes, surfactants, antioxidants, agents for combating free radicals, wetting agents, dispersing agents, antifoaming agents, neutralizing agents, stabilizing agents, active principles chosen from essential oils, UV screening agents, sunscreens, moisturizing agents, vitamins, proteins, ceramides, plant extracts, fibers, and the like, and their mixtures.

### Therapeutic Compositions

[0208] In some embodiments, the composition described herein can be a therapeutic composition that is useful for treating one or more conditions. For example, and in some embodiments, application of the compositions described herein can promote wound healing, reduce or prevent the formation of scar tissue, promote tissue regeneration, minimize local inflammation, minimize tissue rejection, and/or enhance graft integration. In some embodiments, the composition can be formulated as an injectable material, e.g., a hydrogel. Collagen hydrogels present a large, uniform surface area, and can serve as a delivery system for collagen and, optionally, one or more additional therapeutic agents. Injectable collagen materials can also form scaffolds or networks capable of both replacing tissue function and supporting tissue regeneration. In certain embodiments, the composition can be topically applied. In certain embodiments, the composition can be dermally, intradermally, or subcutaneously injected.

[0209] In some embodiments, the therapeutic compositions described herein can comprise one or more additional therapeutic agents and/or prophylactic agents—other than the collagen fragments described elsewhere herein. The one or more additional therapeutic and/or prophylactic agents can be a small molecule active agent or a biomolecule, such as an enzyme or protein, polypeptide, or nucleic acid.

[0210] Non-limiting examples of additional therapeutic and/or prophylactic agents include anti-cancer agents, antimicrobial agents (including anti-viral agents, antibacterial agents, anti-fungal agents, and anti-parasitic agents), antioxidants, analgesics, local anesthetics, anti-inflammatory agents, cytokines, immunosuppressant agents, anti-allergenic agents, essential nutrients, growth factors (such as fibroblast growth factor, hepatocyte growth factor, platelet-derived growth factor, vascular endothelial cell growth factor, and insulin-like growth factor), and combinations thereof. Specific dosages of the additional therapeutic and/or prophylactic agents can be readily determined by those of skill in the art. See Ansel, Howard C. et al., Pharmaceutical Dosage Forms and Drug Delivery Systems (6th ed.) Williams and Wilkins, Malvern, PA (1995).

[0211] In other embodiments, the recombinant collagen fragment composition described herein can be used in combination with cell delivery, for example, the delivery of stem cells, pluripotent cells, somatic cells, and combinations thereof.

[0212] Although the present disclosure contemplates that the therapeutic and/or prophylactic agents will be an integral part of the composition described herein, in some embodiments, the therapeutic and/or prophylactic agents can be administered prior to, in conjunction with, or subsequent to administration of the therapeutic composition described herein. In other words, in some embodiments, the one or more additional therapeutic and/or prophylactic agents may not be integrally incorporated into the present compositions, but be provided separately from the present compositions.

[0213] Non-limiting examples of suitable local anesthetics capable of being included in the present compositions include, but are not limited to, ambucaine, amolanone, amylocaine, benoxinate, benzocaine, betoxycaine, biphenamine, bupivacaine, butacaine, butamben, butanilicaine, butethamine, butoxycaine, carticaine, chloroprocaine, cocaethylene, cocaine, cyclomethycaine, dibucaine, dimethysoquin, dimethocaine, diperodon, dycyclonine, ecgonidine, ecgonine, ethyl chloride, etidocaine, beta-eucaine, euprocin, fenalcomine, formocaine, hexylcaine, hydroxy tetracaine, isobutyl p-aminobenzoate, leucinocaine mesylate, levoxadrol, lidocaine, mepivacaine, meprylcaine, metabutoxycaine, methyl chloride, myrtecaine, naepaine, octacaine, orthocaine, oxethazaine, parethoxycaine, phenacaine, phenol, piperocaine, piridocaine, polidocanol, pramoxine, prilocaine, procaine, propanocaine, proparacaine, propipocaine, propoxycaine, psuedococaine, pyrrocaine, ropivacaine, salicyl alcohol, tetracaine, tolycaine, trimecaine, zolamine, and any combination thereof.

[0214] Non-limiting examples of suitable antiviral agents include ganciclovir and acyclovir. Non-limiting examples of suitable antibiotic agents include aminoglycosides such as streptomycin, amikacin, gentamicin, and tobramycin, ansamycins such as geldanamycin and herbimycin, carbacephems, carbapenems, cephalosporins, glycopeptides such as vancomycin, teicoplanin, and telavancin, lincosamides, lipopeptides such as daptomycin, macrolides such as azithromycin, clarithromycin, dirithromycin, and erythromycin, monobactams, nitrofurans, penicillins, polypeptides such as bacitracin, colistin and polymyxin B, quinolones, sulfonamides, and tetracyclines. Additional exemplary antimicrobial agents include iodine, silver compounds, moxifloxacin, ciprofloxacin, levofloxacin, cefazolin, tigecycline, gentamycin, ceftazidime, ofloxacin, gatifloxacin, amphotericin, voriconazole, natamycin.

[0215] Non-limiting examples of suitable anti-inflammatory agents include steroidal active agents include glucocorticoids, progestins, mineralocorticoids, and corticosteroids. Exemplary non-steroidal anti-inflammatory drug include ketorolac, ibuprofen, nepafenac, diclofenac, aspirin, and naproxen. Other exemplary anti-inflammatory agents include triamcinolone acetonide, fluocinolone acetonide, prednisolone, dexamethasone, loteprendol, fluorometholone, and dipotassium glycyrrhizate.

[0216] In some embodiments, the composition can further comprise one or more additional pharmaceutically active agents. Exemplary pharmaceutical agents can include non-steroidal anti-inflammatory agents (NSAIDs), e.g., flurbiprofen, ibuprofen, naproxen, indomethacin and related compounds. In some embodiments, the composition can further comprise one or more anti-mitotic drugs including colchicine, taxol and related compounds. In some embodiments, the composition can further comprise one or more topical antiseptics such as, e.g., benzoyl peroxide. In some embodiments, the composition can further comprise one or more polysaccharides produced by microalgae, e.g., alguronic acid.

[0217] In some embodiments, the composition can further comprise one or more immune-modulating drugs. Exemplary immune-modulating drugs include imiquimod, cyclosporine, tacrolimus, and rapamycin.

[0218] In some embodiments, the composition can further comprise one or more cytokines. Exemplary suitable cytokines include, but are not limited to, IL-10, TGF-β, IL-25, and IL-35. In certain embodiments, the cytokines can induce Treg activation (e.g. IL-25) and suppress Th17 activation (e.g. IL-10) in order to minimize rejection.

[0219] In some embodiments, the compositions described herein further comprises at least one eukaryotic cell type. Some exemplary eukaryotic cell types include stem cells, mesenchymal stem cells, keratinocytes, fibroblasts, melanocytes, adipocytes, immune cells such as T lymphocytes, B lymphocytes, natural killer cells, and dendritic cells, or combinations thereof. In some embodiments, the stem cells can be adipose-derived mesenchymal stem cells. Functional characteristics of mesenchymal stem cells that can benefit wound healing include their ability to migrate to the site of injury or inflammation, participate in regeneration of damaged tissues, stimulate proliferation and differentiation of resident progenitor cells, promote recovery of injured cells through growth factor secretion and matrix remodeling, and exert unique immunomodulatory and anti-inflammatory effects (See e.g., Phinney O G et al., Stem Cells, 25:2896-2902 (2007); Chamberlain G et al, Stem Cells, 25:2739-2749(2007); Dazzi F et al., Curr Opin Oncol. 19:650-655 (2007)). Each of these references is incorporated by reference in its entirety.

[0220] In some embodiments, the eukaryotic cell can be responsible for increasing the structural integrity of connective tissue and/or promote healing. In some embodiments, the eukaryotic cell, such as a fibroblast, can be responsible for enhancing or promoting the growth or connection of cells or tissues.

[0221] In some embodiments, the recombinant collagen composition can be in contact with 1) an implanted hair graft and 2) tissue into which the hair graft is implanted. Recipient sites for hair grafts include the scalp, the facial region, the armpit or chest region or the pubic region. Specific areas of the facial region include eyebrows, eyelid, mustache, sideburn, chin and cheeks. The recipient site can be any area of skin wherein the appearance of hair is desired by the subject. In some embodiments, the contact between the composition described herein and the implanted hair with the surrounding tissues of the recipient site promotes nutritional perfusion from the surrounding tissues into the graft and increases the survival rate of the graft compared to a graft implanted without the use of the composition described herein. In certain embodiments, the contact between the composition described herein and the implanted hair, and between the composition described herein and the surrounding tissues of the recipient site promotes vascularization around the implanted grafts, such that the survival rate of the graft is increased compared to a graft implanted without the use of the composition described herein.

### Dietary Compositions

[0222] In some embodiments, the composition described herein can be a dietary composition useful for useful for providing collagen to a subject in need thereof. For example, and in some embodiments, consumption of the dietary compositions described herein can provide health and/or skin benefits, such as increasing collagen intake, relieving joint pain, and improving skin health. In certain embodiments, the composition can be in the form of a powder, a capsule, a liquid, or any other suitable form.

[0223] In some embodiments, the dietary compositions can comprise one or more nutritional ingredients such as: ascorbic acid, biotin, chromium nicotinate, copper citrate, D-calcium pantothenate, cyanocobalamin, flax seed, Linum usitatissimum, folic acid, fructooligosaccharide (fiber), magnesium oxide, manganese citrate, maltodextrin, medium chain triglycerides, flavor, niacinamide, potassium citrate potassium iodide, riboflavin, sugar cane (Saccharum officinarum), sodium molybdate dihydrate, sodium selenate (selenium), soy protein isolate, Stevia leaf extract/Stevia rebaudiana, thiamin HCl, tricalcium phosphate, vitamin a palmitate, vitamin D3, xanthan gum, zinc citrate, cellulose gum, guar gum, pyridoxine hydrochloride, salt, tocopherol, antioxidants, e.g., resveratrol, CoQ10, acai berry, lycopene and pomegranate, natural or artificial sweeteners, e.g., glucose, sucrose, fructose, saccharides, cyclamates, aspartamine, sucralose, aspartame, acesulfame K, or sorbitol, flavoring, such as a flavored extract, volatile oil, chocolate flavoring (e.g., non-caffeinated cocoa or chocolate, chocolate substitutes such as carob), peanut butter flavoring, cookie crumb, vanilla, or any commercially available flavoring, and any combination thereof.

[0224] In some embodiments, as mentioned above, the composition described herein can be in the form of an alcohol- or water-based toner. Exemplary toner formulations are set forth below.

### Alcohol-Based Toner

| INGREDIENTS: | % WT/WT |
|---|---|
| Water (Aqua) | Remainder Ingredient |
| Recombinant collagen fragment | about 0.0005% to about 25% |
| disclosed herein | |
| Alcohol Denat. | 10-20% |
| Pentylene Glycol | 5-10% |
| Glycerin | 1-5% |
| Gluconolactone | 0.1-1% |
| Dipotassium Glycyrrhizate | 0.1-1% |
| Sodium Citrate | 0.1-1% |
| Sodium Benzoate | 0.1-1% |

### Water-Based Toner

| INGREDIENTS: | % WT/WT |
|---|---|
| Water (Aqua) | Remainder Ingredient |
| Recombinant collagen fragment | about 0.0005% to about 25% |
| disclosed herein | |
| Niacinamide | 1-5% |
| Pentylene Glycol | 1-5% |
| Propanediol | 1-5% |
| Glycerin | 1-5% |
| Biosaccharide Gum-1 | 0.1-1% |
| Glyceryl Caprylate | 0.1-1% |
| Sodium Anisate | 0.1-1% |
| Sodium Hydroxide | 0.1-1% |
| Caprylhydroxamic Acid | 0.1-1% |
| Acrylates/C10-30 Alkyl Acrylate | 0.1-1% |
| Crosspolymer | |
| Sodium Levulinate | 0.1-1% |
| Caprylyl Glycol | 0.1-1% |

[0225] In some embodiments as mentioned above, the composition described herein can be in the form of a cream, a gel, or a serum. Exemplary cream, gel, and serum formulations are set forth below.

### Cream

| INGREDIENTS: | % WT/WT |
|---|---|
| Water (Aqua) | Remainder Ingredient |
| Recombinant collagen | about 0.0005% to about 25% |
| fragment disclosed herein | |
| Cetearyl Alcohol | 5-10% |
| Glycerin | 1-5% |
| Squalane | 1-5% |
| Butyrospermum Parkii (Shea) | 1-5% |
| Butter | |
| Glyceryl Caprylate | 1-5% |
| Microcrystalline Cellulose | 1-5% |
| Glyceryl Stearate Citrate | 0.1-1% |
| Tocopheryl Acetate | 0.1-1% |
| Cetearyl Glucoside | 0.1-1% |
| Sodium Stearoyl Glutamate | 0.1-1% |
| Cellulose Gum | 0.1-1% |
| Xanthan Gum | 0.1-1% |
| Caprylhydroxamic Acid | 0.1-1% |
| Sodium Phytate | 0.01-0.1% |

### Gel

| INGREDIENTS: | % WT/WT |
|---|---|
| Water (Aqua) | Remainder Ingredient |
| Recombinant collagen fragment | about 0.0005% to about 25% |
| disclosed herein | |
| Sodium Phytate | 0.1-1% |
| Sodium Hydroxide | 0.1-1% |
| Carbomer | 0.1-1% |
| Phenoxyethanol | 0.1-1% |

| INGREDIENTS: | % WT/WT |
|---|---|
| Water (Aqua) | Remainder Ingredient |
| Recombinant collagen fragment | about 0.0005% to about 25% |
| disclosed herein | |
| Pentylene Glycol | 1-5% |
| Niacinamide | 1-5% |
| Dimethicone | 1-5% |
| Propanediol | 1-5% |
| Tocopherol | 0.1-1% |
| Sodium Hyaluronate | 0.1-1% |
| Linoleic Acid | 0.1-1% |
| Ammonium | 0.1-1% |
| Acryloyldimethyltaurate/VP | |
| Copolymer | |
| Acrylates/C10-30 Alkyl Acrylate | 0.1-1% |
| Crosspolymer | |
| Caprylyl Glyceryl Ether | 0.1-1% |
| Tetrasodium Glutamate Diacetate | 0.01-0.1% |
| Sodium Hydroxide | 0.01-0.1% |
| Phenoxyethanol | 0.01-0.1% |
| Linolenic Acid | 0.001-0.0 |

### Serum

[0226] In some embodiments as mentioned above, the composition described herein can be a shampoo or conditioner. Exemplary shampoo or conditioner formulations are set forth below.

### Shampoo

| INGREDIENTS: | % WT/WT |
|---|---|
| Water (Aqua) | Remainder Ingredient |
| Recombinant collagen fragment | about 0.0005% to about 25% |
| disclosed herein | |
| Cocamidopropyl Betaine | 5-10% |
| Sodium Lauroyl Methyl Isethionate | 5-10% |
| Propanediol | 1-5% |
| Sodium Methyl Oleoyl Taurate | 1-5% |
| Sodium Cocoyl Isethionate | 1-5% |
| Trisodium Ethylenediamine | 0.1-1% |
| Disuccinate | |
| Caprylhydroxamic Acid | 0.1-1% |
| Panthenol | 0.1-1% |
| Citric Acid | 0.1-1% |
| Caprylyl Glycol | 0.1-1% |
| Sodium Benzoate | 0.1-1% |

### Conditioner

| INGREDIENTS: | % WT/WT |
|---|---|
| Water (Aqua) | Remainder Ingredient |
| Recombinant collagen fragment | about 0.0005% to about 25% |
| disclosed herein | |
| Cetearyl Alcohol | 5-10% |
| Glyceryl Caprylate | 1-5% |
| Behentrimonium Methosulfate | 1-5% |
| Glycerin | 1-5% |
| Caprylhydroxamic Acid | 0.1-1% |
| Panthenol | 0.1-1% |
| Hydroxyethylcellulose | 0.1-1% |
| Cocos Nucifera (Coconut) Oil | 0.1-1% |
| Citric Acid | 0.01-0.1% |

### D. Yeast Strains

[0227] The present disclosure can use yeast to produce the collagen fragments described herein. In some embodiments, modified yeast can be used to produce collagen fragments. Suitable yeast include those of the genus Pichia, Candida, Komatagaella, Hansenula, Cryptococcus, Saccharomyces and combinations thereof. In some embodiments, the yeast can be from the genus Pichia. The yeast can be modified or hybridized. Hybridized yeast can be prepared by breeding different strains of the same species, different species of the same genus, or strains of different genera. Examples of yeast strains that are suitable to produce the collagen fragments disclosed herein include Pichia pastoris, Pichia membranfaciens, Pichia deserticola, Pichia cephalocereana, Pichia eremophila, Pichia myanmarensis, Pichia anomala, Pichia nakasei, Pichia siamensis, Pichia heedii, Pichia barkeri, Pichia norvegensis, Pichia thermomethanolica, Pichia stipites, Pichia subpelliculosa, Pichia exigua, Pichia occidentalis, Pichia cactophila, and the like.

[0228] In one embodiment, the Pichia pastoris strains can be engineered to express a codon-optimized polynucleotide encoding a collagen fragment.

[0229] In some embodiments, a collagen fragment encoded by a yeast host cell is fused to a polypeptide sequence that facilitates its secretion from the yeast. For example, a vector can encode a chimeric gene comprising a coding sequence for a collagen fragment fused to a sequence encoding a secretion peptide. Secretion sequences which can be used for this purpose include Saccharomyces alpha mating factor Prepro sequence, Saccharomyces alpha mating factor Pre sequence, PHO1 secretion signal, α-amylase signal sequence from Aspergillus niger, Protein with internal repeats 1 signal sequence, Glucoamylase signal sequence from Aspergillus awamori, Serum albumin signal sequence from Homo sapiens, Inulinase signal sequence from Kluyveromcyes maxianus, Invertase signal sequence from Saccharomyces cerevisiae, Killer protein signal sequence from Saccharomyces cerevisiae and Lysozyme signal sequence from Gallus gallus. Other secretion sequences known in the art can also be used.

[0230] In some embodiments one or more of the following yeast promoters can be incorporated into a vector to promoter transcription of mRNA encoding the protein of interest (e.g., a collagen fragment). Promoters are known in the art and include pAOX1, pDas1, pDas2, pPMP20, pCAT, pDF, pGAP, pFDH1, pFLD1, pTAL1, pFBA2, pAOX2, pRKI1, pRPE2, pPEX5, pDAK1, pFGH1, pADH2, pTPI1, pFBP1, pTAL1, pPFK1, pGPM1, and pGCW14.

[0231] In some embodiments a yeast terminator sequence is incorporated into a vector to terminate transcription of mRNA encoding the protein of interest (e.g., a collagen fragment). Terminators include but are not limited to AOX1 TT, Das1 TT, Das2 TT, AOD TT, PMP TT, Cat1 TT, TPI TT, FDH1 TT, TEF1 TT, FLD1 TT, GCW14 TT, FBA2 TT, ADH2 TT, FBP1 TT, and GAP TT.

[0232] In some embodiments, the recombinant collagen fragment described herein is produced in a genetically engineered strain of yeast. In some embodiments, the yeast is Pichia pastoris.

[0233] In some embodiments, the yeast was transformed with a plasmid (vector) comprising the nucleic acid sequence set forth in SEQ ID NO: 973. In some embodiments, to improve recombinant protein expression, the yeast was transformed again (i.e., doubly transformed) with a second plasmid. In some embodiments, the yeast was doubly transformed with a plasmid comprising the nucleic acid sequence set forth in SEQ ID NO: 974.

[0234] In some embodiments, the recombinant collagen fragment described herein is produced by a method comprising:
[0235] (i) fermenting a yeast strain in a fermentation broth;
[0236] (ii) recovering from fermentation broth, recombinant collagen fragments secreted by the yeast strain; and
[0237] (iii) optionally, purifying the recombinant collagen fragments.

[0238] In some embodiments, the recombinant collagen fragment can then undergo ex vivo hydroxylation.

[0239] In some embodiments, the recombinant collagen fragment can be produced in a genetically engineered strain of yeast. In some embodiments, the yeast can be Pichia pastoris. In some embodiments, the yeast can be transformed with a plasmid comprising the nucleic acid sequence set forth in SEQ ID NO: 973. In some embodiments, the yeast can be doubly transformed with a plasmid comprising the nucleic acid sequence set forth in SEQ ID NO: 974.

[0240] In some embodiments, the recombinant collagen fragment sequence variant described herein can be produced by a method comprising:
[0241] (i) fermenting a yeast strain in a fermentation broth;
[0242] (ii) recovering from fermentation broth, recombinant collagen fragment sequence variants secreted by the yeast strain; and
[0243] (iii) optionally, purifying the recombinant collagen fragment sequence variants.

[0244] In some embodiments, the recombinant collagen fragment sequence variants. can then undergo ex vivo hydroxylation.

[0245] In some embodiments, the recombinant collagen fragment variant can be produced in a genetically engineered strain of yeast. In some embodiments, the yeast can be Pichia pastoris. In some embodiments, the yeast can be transformed with a plasmid comprising the nucleic acid sequence set forth in any one of SEQ ID NOs: 1045-1073. In some embodiments, the yeast can be doubly transformed with a nucleic acid sequence set forth in any one of SEQ ID NOs: 1045-1073.

[0246] DNA can be introduced into the yeast strain by electroporation. Transformants can be selected, for example, using host yeast cells that are auxotrophic for leucine, tryptophan, uracil, or histidine together with selectable marker genes such as LEU2, TRP1, URA3, HIS3, or LEU2-D. The DNA sequence for the collagen fragment can be introduced into the yeast via a vector, e.g., by electroporation. DNA can be inserted into a vector. Suitable vectors include, but are not limited to, pHTX1-BiDi-P4HA-Pre-P4HB hygro, pHTX1-BiDi-P4HA-PHO1-P4HB hygro, pGCW14-pGAP1-BiDi-P4HA-Prepro-P4HB G418, pGCW14-pGAP1-BiDi-P4HA-PHO1-P4HB Hygro, pDF-Col3A1 modified Zeocin, pCAT-Col3A1 modified Zeocin, pDF-Col3A1 modified Zeocin with AOX1 landing pad, pHTX1-BiDi-P4HA-Pre-Pro-P4HB hygro. The vectors typically included at least one restriction site for linearization of DNA. Once within a yeast strain, DNA can be inserted into the yeast genome and used to produce collagen fragments.

[0247] In some embodiments, the present disclosure provides a strain of yeast, e.g., Pichia pastoris, genetically engineered to produce the recombinant collagen fragment described herein, wherein the strain of yeast comprises a vector comprising a DNA sequence encoding the recombinant collagen fragment. In some embodiments, the vector can comprise a nucleic acid sequence comprising the DNA sequence set forth in SEQ ID NO: 973. In some embodiments, the vector can comprise a nucleic acid sequence comprising the DNA sequence set forth in SEQ ID NO: 974. In some embodiments, the vector is inserted into the yeast through electroporation.

[0248] In some embodiments, the present disclosure provides a vector comprising a DNA sequence for producing a collagen fragment, wherein the vector comprises the nucleic acid sequence set forth in SEQ ID NO: 973.

[0249] In some embodiments, the present disclosure provides a vector comprising a DNA sequence for producing a collagen fragment, wherein the vector comprises the nucleic acid sequence set forth in SEQ ID NO: 974.

[0250] In some embodiments, the present disclosure provides a vector comprising a DNA sequence for producing a collagen fragment, wherein the vector comprises the nucleic acid sequence set forth in any one of SEQ ID NOs: 1045-1073.

[0251] In some embodiments, the present disclosure provides a strain of collagen fragment-producing yeast comprising a vector comprising a DNA sequence for producing the recombinant collagen fragment described herein.

[0252] A promoter can improve the production of a recombinant protein and can be included in a vector comprising sequences encoding the protein of interest (e.g., the collagen fragments described herein). Suitable promoters for use in preparing the collagen fragments disclosed herein include, but are not limited to, AOX1 methanol induced promoter, pDF de-repressed promoter, pCAT de-repressed promoter, Das1-Das2 methanol induced bi-directional promoter, pHTX1 constitutive Bi-directional promoter, pGCW14-pGAP1 constitutive Bi-directional promoter and combinations thereof. Suitable methanol induced promoters include but are not limited to AOX2, Das 1, Das 2, pDF, pCAT, pPMP20, pFDH1, pFLD1, pTAL2, pFBA2, pPEX5, pDAK1, pFGH1, pRKI1, pREP2, and combinations thereof.

[0253] A terminator can be placed at the end of each open reading frame utilized in the vectors incorporated into the yeast. The DNA sequence for the terminator can be inserted into the vector. For replicating vectors, an origin of replication is necessary to initiate replication. The DNA sequence for the origin of replication is inserted into the vector. One or more DNA sequences containing homology to the yeast genome can be incorporated into the vector to facilitate recombination and incorporation into the yeast genome or to stabilize the vector once transformed into the yeast cell.

[0254] A vector can also generally include at least one selective marker that is used to select yeast cells that have been successfully transformed. The markers sometimes are related to antibiotic resistance and markers can also be related to the ability to grow with or without certain amino acids (auxotrophic markers). Suitable auxotrophic markers included, but are not limited to ADE, HIS, URA, LEU, LYS, TRP and combinations thereof. To provide for selection of yeast cells containing a recombinant vector, at least one DNA sequence for a selection marker can be incorporated into the vector.

[0255] The engineered yeast cells described above can be utilized as hosts to produce the collagen fragment described herein. In order to do so, the cells can be placed in media within a fermentation chamber and fed dissolved oxygen and a source of carbon (e.g., glycerol), under controlled pH conditions for a period of time ranging from twelve hours to 1 week. Suitable media include but are not limited to buffered glycerol complex media (BMGY), buffered methanol complex media (BMMY), and yeast extract peptone dextrose (YPD).

### E. Methods of Use

### Increasing Collagen Production in Cells

[0256] The present inventors have surprisingly discovered that the collagen fragments described in this disclosure can induce the production of Type I and Type III collagen in cells such as fibroblasts. Thus, when applied to cells such as fibroblasts, or to other appropriate cells, the collagen fragment described here (i.e., a collagen fragment having the amino acid sequence of SEQ ID NO: 1 or SEQ ID NO: 986, or a composition comprising such a fragment) can advantageously induce collagen formation in the cells on which it is applied.

[0257] Accordingly, in some embodiments, the present disclosure provide methods of increasing collagen production in cells, comprising administering a collagen fragment described herein to cells. Such administration can consist of directly exposing the cells to the collagen fragment in an amount sufficient to induce the cells to produce greater amounts of collagen. In some embodiments, the method comprises administering the collagen fragment as part of a composition comprising the collagen fragment and at least one pharmaceutically acceptable excipient. In some embodiments, the collagen fragment can be administered to cells in their natural context, such as in an organism or tissue. In some embodiments, the collagen fragment can be topically applied to skin. In some embodiments, the collagen fragment can be topically applied to human skin. In some embodiments, the collagen fragment can be administered to cultured cells as part of the culture media.

[0258] In some embodiments, the cells can be fibroblasts. In some embodiments, the cells can be fibroblasts in their native context (e.g., within human skin). In some embodiments, the cells can be primary human fibroblasts. In some embodiments, the cells can be muscle cells, transformed human cells, cardiomyocytes, endothelial cells, stem cells, or induced pluripotent stem cells.

[0259] In some embodiments, the recombinant collagen fragments disclosed herein, or compositions comprising one or more fragments, can be applied to a wound, such as a cut, laceration, gash, tear, scrape, abrasion, or scratch, in order to increase collagen production at the wound site and/or its surrounding tissues. As part of the wound healing process, fibroblasts migrate to a wound site and produce collagen that is necessary for wound repair. The cells eventually fill the wound cavity with a network of interlacing threads of collagen which in due time, arrange themselves in firm bands and form the permanent new tissue. Accordingly, in some embodiments, the recombinant collagen fragment according to SEQ ID NO: 1 or SEQ ID NO: 986 or compositions comprising the fragment can be applied to a wound, such as a cut, laceration, gash, tear, scrape, abrasion, or scratch, in order to increase collagen production at the wound site and/or its surrounding tissues. In some embodiments, one or more hydrolysis products of the recombinant collagen fragment according to SEQ ID NO: 1 or SEQ ID NO: 986, or compositions comprising such hydrolysis products, can be applied to a wound, such as a cut, laceration, gash, tear, scrape, abrasion, or scratch, in order to increase collagen production at the wound site and/or its surrounding tissues. In some embodiments, compositions comprising a mixture of the recombinant collagen fragment according to SEQ ID NO: 1 or SEQ ID NO: 986 and one or more hydrolysis products thereof can be applied to a wound, such as a cut, laceration, gash, tear, scrape, abrasion, or scratch, in order to increase collagen production at the wound site and/or its surrounding tissues.

[0260] Therefore, in certain embodiments, the present disclosure provides methods of applying compositions comprising a recombinant collagen fragment, hydrolysis products of a recombinant collagen fragment, or combinations thereof to a wound, such as a cut, laceration, gash, tear, scrape, abrasion, or scratch. In certain embodiments, the wound can be a wound in a human subject. In some embodiments, the method comprises providing a composition for and promoting collagen production and wound healing in the skin of a subject in need thereof, wherein the composition comprises a recombinant collagen fragment described herein (e.g., a fragment comprising SEQ ID NO: 1 or SEQ ID NO: 986). In some embodiments, the method comprises providing a composition for and promoting collagen production and wound healing in the skin of a subject in need thereof, wherein the composition comprises one or more hydrolyzed products of a recombinant collagen fragment described herein (e.g., hydrolyzed products comprising one or more of SEQ ID NOs: 2-972). In some embodiments, the method comprises providing a composition for and promoting collagen production and wound healing in the skin of a subject in need thereof, wherein the composition comprises a mixture of a recombinant collagen fragment and one or more hydrolyzed products of that recombinant collagen fragment, as described herein (e.g., a mixture of a fragment comprising SEQ ID NO: 1 or SEQ ID NO: 986, and hydrolyzed products comprising SEQ ID NOs: 2-972).

[0261] In some embodiments, the method can comprise administering a collagen fragment with the amino acid sequence of SEQ ID NO: 1 or SEQ ID NO: 986 to cells. In some embodiments, the method can comprise administering a hydrolysis product resulting from the hydrolysis of a collagen fragment with the amino acid sequence of SEQ ID NO: 1 or SEQ ID NO: 986 to cells (e.g., administering one or more hydrolysis products with sequences according to SEQ ID NOs: 2-972). In some embodiments the method comprises administering a recombinant collagen fragment described herein and one or more hydrolysis products of that recombinant collagen fragment to cells. In some embodiments the method can comprise administering a collagen fragment with the amino acid sequence of SEQ ID NO: 1 or SEQ ID NO: 986, and one or more hydrolysis products of that fragment that have sequences according to SEQ ID NOs: 2-972 to cells.

[0262] In some embodiments, the method can increase the production of Type I collagen. In some embodiments, the method can increase the production of Type III collagen. In some embodiments, the method can increase the production of both Type I and Type III collagen.

### Skincare

[0263] In some embodiments, the composition described herein can be a skincare composition that can be used to treat an area of the skin by topically applying the skincare composition to the area of skin.

[0264] In some embodiments, the composition described herein can be a skincare composition that can be used to treat the skin, hair, and nails, by consuming the composition as a dietary supplement.

[0265] In some embodiments, administration of the composition described herein to the skin can improve or maintain the quality of skin and reduce or eliminate signs of aging. Signs of aging include, but are not limited to, all outward visibly and tactilely perceptible manifestations as well as any other macro or micro effects due to skin aging. Such signs may be induced or caused by intrinsic factors or extrinsic factors (such as chronological aging and/or environmental damage). These signs may result from processes which include, but are not limited to, the development of textural discontinuities such as wrinkles and coarse deep wrinkles, fine lines, skin lines, crevices, bumps, large pores (e.g., associated with adnexal structures such as sweat gland ducts, sebaceous glands, or hair follicles), or unevenness or roughness, loss of skin elasticity (loss and/or inactivation of functional skin elastin), sagging (including puffiness in the eye area and jowls), loss of skin firmness, loss of skin tightness, loss of skin recoil from deformation, discoloration (including undereye circles), blotching, sallowness, hyperpigmented skin regions such as age spots and freckles, keratoses, abnormal differentiation, hyperkeratinization, elastosis, collagen breakdown, and other histological changes in the stratum corneum, dermis, epidermis, the skin vascular system (e.g., telangiectasia or spider vessels), and underlying tissues (e.g., fat and/or muscle), especially those proximate to the skin.

[0266] In some embodiments, a composition as described herein can be suitable for use as a dermal filler. A dermal filler composition can replace lost endogenous matrix polymers, or enhance/facilitate the function of existing matrix polymers, in order to treat skin conditions due to aging or injury. The dermal filler composition can fill wrinkles, lines, folds, scars, and to enhance dermal tissue, such as, e.g., to plump thin lips, or fill-in sunken eyes or shallow cheeks. Earlier dermal filler products generally were made of collagens. One common matrix polymer used in modern dermal filler compositions is hyaluronan. Because hyaluronan is natural to the human body, it is a generally well tolerated and a fairly low risk treatment for a wide variety of skin conditions.

[0267] In some embodiments, a composition as described herein can be suitable for use with a microneedle sheet or patch. Microneedles can provide the composition described herein to any area of the face and body to achieve a cosmetic benefit or wound healing benefit.

[0268] In some embodiments, the composition described herein can be a therapeutic composition that can be used to reduce or prevent the formation of scar tissue, promoting healing, promoting tissue regeneration, minimizing local inflammation, minimizing tissue rejection, and/or enhance skin and/or hair graft integration.

[0269] In some embodiments, the disclosure provides a method of treating a dermatological condition comprising administering an effective amount of the composition comprising a recombinant collagen fragment to a subject in need thereof. In some embodiments, the dermatological condition can be fine lines, wrinkles, dry skin, excessive pore size, skin dyschromia, reduced elasticity, unwanted hair, skin thinning, purpura, actinic keratosis, pruritus, eczema, acne, rosacea, erythema, telangiectasia, actinic telangiectasia, skin cancer, or rhinophyma.

[0270] In some embodiments, the composition can be topically administered to an area of skin. In some embodiments, the area of skin can be selected from the group consisting of a facial surface, scalp, neck, ears, shoulders, chest (including breasts and/or the decolletage), arms, hands, legs, stomach, buttocks, groin, back, feet, and combinations thereof.

[0271] In some embodiments, the composition can be topically administered to a facial surface. In some embodiments, the facial surface can be selected from the group consisting of forehead, eyes, a perioral surface, a chin surface, a periorbital surface, a nasal surface, a cheek skin surface, and combinations thereof.

[0272] In some embodiments, the disclosure provides a method for improving collagen production in the skin, comprising administering an effective amount of a composition comprising a recombinant collagen fragment.

[0273] In some embodiments, the disclosure provides a skincare product comprising the composition described herein for use in reducing the appearance of wrinkles, evening skin tone, providing moisture, reducing the appearance of dark circles under the eyes, increasing the collagen content of skin, increasing skin density, improving skin firmness and elasticity, improving the appearance of lines and wrinkles, smoothing the skin texture, increasing skin radiance and luminosity, improving the appearance of sagging skin, whitening the skin, or any combination thereof.

### EMBODIMENTS

[0274] E1. A recombinant collagen fragment having a molecular weight of about 50 kDa and a sequence identity of at least about 85% to the amino acid sequence set forth in SEQ ID NO: 986.

[0275] E2. The recombinant collagen fragment of embodiment 1, wherein the recombinant collagen fragment is unhydroxylated.

[0276] E3. The recombinant collagen fragment of embodiment 1, wherein the recombinant collagen fragment is hydroxylated.

[0277] E4. The recombinant collagen fragment of embodiment 1, wherein the collagen fragment has the amino acid sequence set forth in SEQ ID NO: 986.

[0278] E5. A sequence variant of the recombinant collagen fragment of embodiment 1, wherein the sequence variant comprises the amino acid sequence set forth in any one of SEQ ID NOs: 987-1015.

[0279] E6. The sequence variant of embodiment 5, wherein the sequence variant is unhydroxylated.

[0280] E7. The sequence variant of embodiment 5, wherein the sequence variant is hydroxylated.

[0281] E8. A composition comprising the recombinant collagen fragment of any one of embodiments 1-4.

[0282] E9. A composition comprising the sequence variant of any one of embodiments 5-7.

[0283] E10. The composition of embodiment 8, wherein the composition further comprises one or more peptides formed from the hydrolyzation of the collagen fragment having the amino acid sequence set forth in SEQ ID NO: 986.

[0284] E11. The composition of embodiment 10, wherein at least one of the one or more peptides formed from the hydrolyzation of the collagen fragment having the amino acid sequence set forth in SEQ ID NO: 986 has an amino acid sequence according to one of SEQ ID NOs: 2-972.

[0285] E12. The composition of any one of embodiments 8-11, further comprising a pharmaceutically acceptable or cosmetically acceptable excipient.

[0286] E13. A method of producing the recombinant collagen fragment of any one of embodiments 1-4, comprising producing the recombinant collagen fragment in a genetically engineered strain of yeast.

[0287] E14. The method of embodiment 13, wherein the yeast is Pichia pastoris.

[0288] E15. The method of embodiment 13 or 14, wherein the yeast has been transformed with a plasmid comprising the nucleic acid sequence set forth in SEQ ID NO: 973.

[0289] E16. The method of any one of embodiments 13-15, wherein the yeast is a yeast that has been transformed with a plasmid comprising the nucleic acid sequence set forth in SEQ ID NO: 974.

[0290] E17. The method of any one of embodiments 13-16, wherein the method comprises:
[0291] (i) fermenting a genetically engineered yeast in a fermentation broth;
[0292] (ii) recovering from the fermentation broth recombinant collagen fragments secreted by the genetically engineered yeast; and
[0293] (iii) optionally, purifying the recombinant collagen fragments.

[0294] E18. The method of embodiment 17, further comprising hydroxylating the recombinant collagen fragment ex vivo.

[0295] E19. A method of producing the sequence variant of any one of embodiments 5-7, comprising producing the recombinant collagen fragment in a genetically engineered strain of yeast.

[0296] E20. The method of embodiment 19, wherein the yeast is Pichia pastoris.

[0297] E21. The method of embodiment 19 or 20, wherein the yeast has been transformed with a plasmid comprising the nucleic acid sequence set forth in any one of SEQ ID NO: 1045-1073.

[0298] E22. The method of any one of embodiments 19-21, wherein the method comprises:
[0299] (i) fermenting a genetically engineered yeast in a fermentation broth;
[0300] (ii) recovering from the fermentation broth recombinant collagen fragment sequence variants secreted by the genetically engineered yeast; and
[0301] (iii) optionally, purifying the recombinant collagen fragments.

[0302] E23. The method of embodiment 22, further comprising hydroxylating the recombinant collagen sequence variant ex vivo.

[0303] E24. A strain of yeast genetically engineered to produce the recombinant collagen fragment of any one of embodiments 1-4, wherein the strain of yeast comprises a vector comprising a DNA sequence encoding the recombinant collagen.

[0304] E25. A strain of yeast genetically engineered to produce the sequence variant of any one of embodiments 5-7, wherein the strain of yeast comprises a vector comprising a DNA sequence encoding the variant.

[0305] E26. The strain of yeast of embodiment 24, wherein the vector comprises a nucleic acid sequence comprising the DNA sequence set forth in SEQ ID NO: 973.

[0306] E27. The strain of yeast of embodiment 26, further comprising a second vector comprising a nucleic acid sequence comprising the DNA sequence set forth in SEQ ID NO: 974.

[0307] E28. The strain of yeast of embodiment 25, wherein the vector comprises a nucleic acid sequence comprising the DNA sequence set forth in any one of SEQ ID NO: 1045-1073.

[0308] E29. The strain of yeast of any one of embodiments 24-28, wherein the strain of yeast is a Pichia pastoris.

[0309] E30. A method of treating a dermatological condition comprising administering an effective amount of the recombinant collagen fragment of any one of embodiments 1-4, or the sequence variant of any one of embodiments 5-7, to a subject in need thereof.

[0310] E31. A method of treating a dermatological condition comprising administering an effective amount of the composition of any one of embodiments 8-12 to a subject in need thereof.

[0311] E32. The method of embodiment 31, wherein the dermatological condition comprises fine lines, wrinkles, dry skin, excessive pore size, skin dyschromia, reduced elasticity, unwanted hair, skin thinning, purpura, actinic keratosis, pruritus, eczema, acne, rosacea, erythema, telangiectasia, actinic telangiectasia, skin cancer, or rhinophyma.

[0312] E33. The method of embodiment 31 or 32, wherein the composition is topically administered to an area of skin.

[0313] E34. The method of embodiment 33, wherein the area of skin is selected from the group consisting of a facial surface, scalp, neck, ears, shoulders, chest (including breasts and/or the decolletage), arms, hands, legs, stomach, buttocks, groin, back, feet, and combinations thereof.

[0314] E35. A method of increasing collagen production in cells, comprising administering an effective amount of the recombinant collagen fragment of any one of embodiments 1-4, or the sequence variant of any one of embodiments 5-7, to the cells.

[0315] E36. The method of embodiment 35, wherein the method increases the production of Type I collagen.

[0316] E37. The method of embodiment 34 or 35, wherein the method increases the production of Type III collagen.

[0317] E38. The method of any one of embodiments 35-37, wherein the cells are fibroblasts.

[0318] E39. The method of any one of embodiments 35-38 wherein the cells are cultured cells.

[0319] E40. The method of any one of embodiments 35-39, wherein the fragment or variant is formulated in a composition.

[0320] E41. The method of any one of embodiments 35-41, wherein the fragment has an amino acid sequence set forth in SEQ ID NO: 986.

[0321] E42. The method of any one of embodiments 35-41, wherein the sequence variant has an amino acid sequence set forth in any one of SEQ ID NOs: 987-1015.

[0322] E43. A skincare product comprising the composition of any one of embodiments 8-12, for use in reducing the appearance of wrinkles, evening skin tone, providing moisture, reducing the appearance of dark circles under the eyes, increasing the collagen content of skin, increasing skin density, improving skin firmness and elasticity, improving the appearance of lines and wrinkles, smoothing the skin texture, increasing skin radiance and luminosity, improving the appearance of sagging skin, whitening the skin, or any combination thereof.

[0323] E44. A method of treating a wound in a human subject in need thereof, the method comprising applying the composition of any one of embodiments 8-12 to the wound on the subject, wherein applying the recombinant collagen fragment induces the production of human Type I collagen, human Type III collagen, or a combination thereof.

[0324] E45. The method of embodiment 44, wherein the collagen fragment is topically applied to the wound.

[0325] E46. A recombinant collagen fragment having a molecular weight of about 50 kDa and a sequence identity of at least about 85% to the amino acid sequence set forth in SEQ ID NO: 1.

[0326] E47. The recombinant collagen fragment of embodiment 46, wherein the recombinant collagen fragment is unhydroxylated.

[0327] E48. The recombinant collagen fragment of embodiment 46, wherein the recombinant collagen fragment is hydroxylated.

[0328] E49. The recombinant collagen fragment of embodiment 48, wherein the collagen fragment has the amino acid sequence set forth in SEQ ID NO: 1.

[0329] E50. A recombinant collagen fragment comprising an amino acid sequence according to any one of SEQ ID NOs: 2-972.

[0330] E51. A composition comprising the recombinant collagen fragment of any one of embodiments 46-50.

[0331] E52. The composition of embodiment 51, wherein the composition further comprises one or more peptides formed from the hydrolyzation of the collagen fragment having the amino acid sequence set forth in SEQ ID NO: 1.

[0332] E53. The composition of embodiment 52, wherein at least one of the one or more peptides formed from the hydrolyzation of the collagen fragment having the amino acid sequence set forth in SEQ ID NO: 1 has an amino acid sequence according to one of SEQ ID NOs: 2-972.

[0333] E54. The composition of any one of embodiments 51-53, further comprising a pharmaceutically acceptable or cosmetically acceptable excipient.

[0334] E55. A method of producing the recombinant collagen fragment of any one of embodiments 46-50, comprising producing the recombinant collagen fragment in a genetically engineered strain of yeast.

[0335] E56. The method of embodiment 55, wherein the yeast is Pichia pastoris.

[0336] E57. The method of embodiment 55 or 56, wherein the yeast has been transformed with a plasmid comprising the nucleic acid sequence set forth in SEQ ID NO: 973.

[0337] E58. The method of any one of embodiments 55-57, wherein the yeast is a yeast that has been transformed with a plasmid comprising the nucleic acid sequence set forth in SEQ ID NO: 974.

[0338] E59. The method of any one of embodiments 55-58, wherein the method comprises:
[0339] (i) fermenting a genetically engineered yeast in a fermentation broth;
[0340] (ii) recovering from the fermentation broth recombinant collagen fragments secreted by the genetically engineered yeast; and
[0341] (iii) optionally, purifying the recombinant collagen fragments.

[0342] E60. The method of embodiment 59, further comprising hydroxylating the recombinant collagen fragment ex vivo.

[0343] E61. A strain of yeast genetically engineered to produce the recombinant collagen fragment of any one of embodiments 46-50, wherein the strain of yeast comprises a vector comprising a DNA sequence encoding the recombinant collagen.

[0344] E62. The strain of yeast of embodiment 61, wherein the vector comprises a nucleic acid sequence comprising the DNA sequence set forth in SEQ ID NO: 973.

[0345] E63. The strain of yeast of embodiment 62, further comprising a second vector comprising a nucleic acid sequence comprising the DNA sequence set forth in SEQ ID NO: 974.

[0346] E64. The strain of yeast of any one of embodiments 61-63, wherein the strain of yeast is a Pichia pastoris.

[0347] E65. A method of treating a dermatological condition comprising administering an effective amount of the recombinant collagen fragment of any one of embodiments 46-50 to a subject in need thereof.

[0348] E66. A method of treating a dermatological condition comprising administering an effective amount of the composition of any one of embodiments 51-54 to a subject in need thereof.

[0349] E67. The method of embodiment 66, wherein the dermatological condition comprises fine lines, wrinkles, dry skin, excessive pore size, skin dyschromia, reduced elasticity, unwanted hair, skin thinning, purpura, actinic keratosis, pruritus, eczema, acne, rosacea, erythema, telangiectasia, actinic telangiectasia, skin cancer, or rhinophyma.

[0350] E68. The method of embodiment 66 or 67, wherein the composition is topically administered to an area of skin.

[0351] E69. The method of embodiment 68, wherein the area of skin is selected from the group consisting of a facial surface, scalp, neck, ears, shoulders, chest (including breasts and/or the decolletage), arms, hands, legs, stomach, buttocks, groin, back, feet, and combinations thereof.

[0352] E70. A method of increasing collagen production in cells, comprising administering an effective amount of the recombinant collagen fragment of any one of embodiments 46-50 to the cells.

[0353] E71. The method of embodiment 70, wherein the method increases the production of Type I collagen.

[0354] E72. The method of embodiment 70 or 71, wherein the method increases the production of Type III collagen.

[0355] E73. The method of any one of embodiments 70-72, wherein the cells are fibroblasts.

[0356] E74. The method of any one of embodiments 70-73, wherein the cells are cultured cells.

[0357] E75. The method of any one of embodiments 70-74, wherein the fragment is formulated in a composition.

[0358] 76. The method of any one of embodiments 70-75, wherein the fragment has an amino acid sequence set forth in SEQ ID NO: 1.

[0359] E77. A skincare product comprising the composition of any one of embodiments 51-54, for use in reducing the appearance of wrinkles, evening skin tone, providing moisture, reducing the appearance of dark circles under the eyes, increasing the collagen content of skin, increasing skin density, improving skin firmness and elasticity, improving the appearance of lines and wrinkles, smoothing the skin texture, increasing skin radiance and luminosity, improving the appearance of sagging skin, whitening the skin, or any combination thereof.

[0360] E78. A method of treating a wound in a human subject in need thereof, the method comprising applying the composition of any one of embodiments 51-54 to the wound on the subject, wherein applying the recombinant collagen fragment induces the production of human Type I collagen, human Type III collagen, or a combination thereof.

[0361] E79. The method of embodiment 78, wherein the collagen fragment is topically applied to the wound.

### EXAMPLES

### Example 1: Generation of Pichia Strain Producing Truncated Human Collagen III Fragments

[0362] A plasmid encoding secretion signal-secreted 50 kDa human collagen having an amino acid sequence according to SEQ ID NO: 986 (the “50 kDa human collagen fragment”) with zeocin resistance, named Vector A, and shown in FIG. 1, was constructed as follows. To generate the secretion signal fragment, the vector of SEQ ID NO: 984 was amplified via polymerase chain reaction (PCR) with the primers 1 (SEQ ID NO: 975) and 2 (SEQ ID NO: 976). PCR was performed with PHUSION PLUS DNA POLYMERASE using an initial denaturation of 2 min at 95° C. followed by 25 cycles of 95° C. for 30 seconds, 60° C. for 30 seconds, and 72° C. for 15 seconds, and a final extension at 72° C. for 5 minutes. To generate a 50 kDa collagen fragment comprising an amino acid according to SEQ ID NO: 986, the vector of SEQ ID NO: 985 was amplified via PCR with the primers 3 and 4 (SEQ ID NO: 981) and (SEQ ID NO: 977), respectively. PCR was performed with an initial denaturation of 2 minutes at 95° C. followed by 25 cycles of 95° C. for 30 s, 60° C. for 30 s, and 72° C. for 1 minute, and a final extension at 72° C. for 5 minutes. The MMV132 vector (see U.S. 2019/0040400, the entirety of which is incorporated herein by reference) backbone was digested with Mly I restriction endonuclease. All DNA fragments were purified by agarose gel electrophoresis. Fragments were assembled using Gibson Assembly® Master Mix (New England BioLabs).

[0363] The resulting circular plasmid DNA was transformed into DH5a E. coli. Zeocin-resistant transformants were obtained after overnight growth at 37° C. 50 kDa collagen fragment constructs were verified by Sanger sequencing. Plasmid DNA from positive clones was purified by PureLink™ HiPure Plasmid Midiprep Kit (Invitrogen). The DNA was linearized by Swa I digestion.

[0364] For expression of the 50 kDa collagen fragment, the linearized plasmid was transformed into the PP97 Pichia pastoris (Komagataella phaffii) strain by electroporation with the BIO-RAD GENE PULSER XCELL Total System. Transformants were grown at 30° C. on YPD agar containing 1M sorbitol and 500 μg/mL zeocin. The resulting strain, containing the 50 kDa human collagen fragment under zeocin resistance, was designated as Pichia Strain 1.

[0365] To further improve the recombinant protein expression, a second transformation of the 50 kDa human collagen fragment construct was performed with a nourseothricin N-acetyl transferase (NAT) marker. First, molecular cloning was performed to generate the necessary plasmid DNA. A new vector encoding signal sequence, the 50 kDa human collagen fragment, NAT, and beta-lactamase, named Vector B was created as follows (see FIG. 2). Vector A (FIG. 1) was digested with the Xba I and Eco RV restriction enzymes. The vector of SEQ ID NO: 983, containing NAT resistance, was digested with the Nde I and Bsa I restriction enzymes. The vector fragments containing the 50 kDa human collagen fragment and NAT resistance, respectively, were purified from an agarose gel. Fragments were joined via Gibson assembly and transformed into DH5a competent Escherichia coli (E. coli). For carbenicillin-resistant transformants, the 50 kDa human collagen fragment construct was verified by Sanger sequencing. Plasmid DNA was purified via midiprep, linearized with the Swa I restriction enzyme, and transformed into Pichia strain 1. The resulting doubly transformed strain was designated as Pichia strain 2.

[0366] To identify Pichia clones with high expression levels, small-scale cultures were grown for 40 hours in 96 deep well blocks. Cells were pelleted by centrifugation and the supernatant was harvested. Recombinant protein expression was assessed via sodium dodecyl sulphate-polyacrylamide gel electrophoresis (SDS-PAGE). Western blotting was performed with a custom-made primary antibody against the C-telopeptide of collagen (Abmart) and the IRDye® 800CW Goat anti-Mouse IgG secondary antibody (LI-COR).

[0367] Screening for collagen production was performed by sandwich enzyme-linked immunosorbent assay (ELISA). This assay utilizes the aforementioned custom-made C-telo antibody as a capture antibody (Abmart) and a commercially available detection antibody, anti-COL3A horseradish peroxidase-conjugate (sc-271249, Santa Cruz). The signal was generated with 3,3′,5,5′-tetramethylbenzidine (TMB) and the reaction was stopped with 2M sulfuric acid. The signal was detected by measuring absorbance at 450 nm with a spectrophotometer. Using these methods, Pichia strain 3 was selected as the best clone.

### Example 2: Fermentation of Selected Clone

[0368] A three-step fermentation process was started by propagating Pichia strain 3 clone in shake flasks, followed by a seed fermentation lasting approximately 23-27 hours, which was then used to inoculate a production fermenter. The production fermenter was run for about 72 hours with a 24-hour batch phase followed by a 48 hour fed-batch phase. Glycerol is used as the carbon source, and a glycerol feed to maintain a constant max OTR value of 150 mmol per L per hour was begun at the end of batch phase. The OTR of 150 mmol per L per hour was maintained by a constant glycerol feeding and by adjusting initial pressure to 800 mbar overpressure, and 1 vvm aeration. The pH was controlled to 6±0.05 by automated addition of 25% ammonium hydroxide and the temperature and the DO were controlled to 32° C. and 25% (of saturation at 800 mbar overpressure) respectively. Samples were taken throughout the fermentation, and the OD600, wet cell weight, dry weight, residual nitrogen, and residual glycerol were measured. (FIGS. 3A-3D).

### Example 3: Purification of Truncated Human Collagen III Fragment

### Fermentation Supernatant Recovery

[0369] The fermentation broth included a supernatant containing the secreted 50 kDa human collagen having an amino acid sequence according to SEQ ID NO: 986 (the “50 kDa human collagen fragment”) that was first recovered through centrifugation. Depending on the process scale, the supernatant was recovered by batch centrifugation using a Sorvall centrifuge (10 min, 10° C., 17568×g) or using a disc stack centrifuge. For the recovery of the supernatant through disc stack centrifugation, the fermentation broth was diluted with DI water to a wet cell weight (WCW) of 200 g/kg. The disc stack centrifuge (GEA HFC-15) was operated at maximum bowl speed and a feed rate of 350 L/h. After the feed was passed through the centrifuge once, the ejected solids were diluted back to a WCW of 200 g/kg before a second pass. The supernatant obtained from both passes was pooled and continued to the secondary clarification. Flow charts showing the process of purifying the resulting 50 kDa human collagen fragment are shown in FIG. 5 and FIG. 6. FIG. 5 shows the purification process for preparing unhydroxylated 50 kDa human collagen, and FIG. 6 shows the purification process for preparing hydroxylated 50 kDa human collagen

### Cake Filtration

[0370] Cake filtration was performed as a secondary clarification step, using a Metchem 470 mm filter press. Per plate used, 0.379 kg of Celite 512 diatomaceous earth was mixed with 20 kg water and applied as a precoat on the filter press. 0.5 wt. % of Celite 512 diatomaceous earth and 0.5 wt. % of Celite SuperCel Fine DE were added to the supernatant and the material and passed through the filter press to remove residual particulate matter.

### UF Concentration

[0371] Prior to concentrating the collagen solution, the pH was adjusted to 4 by addition of 50% sulfuric acid. The volume of the resulting solution was decreased by a minimum of a factor 10 through cross flow filtration, using spiral wound PES membranes with a molecular weight cut-off of 10 kDa.

### Diafiltration

[0372] Diafiltration was performed to remove small impurities such as salts from the product. Before diafiltration, the pH was adjusted to 8 when necessary by addition of acid (50% sulfuric acid) or base (10 N sodium hydroxide). The diafiltration was performed either in a KrosFlo® KR2i filtration skid equipped with a 10 kDa mPES hollow fiber module or an Alfa Laval M20 filtration skid equipped with a 10 kDa PES spiral wound module. DI water was used as diafiltration medium and the diafiltration was continued until the conductivity of the solution plateaued.

### Preservative

[0373] The product of the diafiltration was diluted by addition of deionized (DI) water to reach a concentration of dissolved solids of 2% and during this dilution, 1,2-hexanediol and butylene glycol were added to reach effective concentrations of respectively 3% and 5%.

[0374] A chart depicting the percent recovery of the 50 kDa human collagen fragment during individual steps of its purification process, and overall during all of the steps up to those individual steps, is shown in FIG. 7.

### Example 4: Characterization of Truncated Human Collagen III Fragment

### Mass Spectrometry (MS) and Sequence Analyses

[0375] In solution digestion was performed using an S-Trap micro spin column (ProtiFi, Huntington, NY, USA) following a Strap protocol on as described previously with slight modification. The protein samples (30 μg) in 25 μL of 50 mM TEAB pH 8.5, 6 M Urea, 2 M Thiourea, 1% SDS, 10 mM DTT were reduced for 1 h at 34° C., followed by alkylation with 50 mM iodoacetamide for 45 min at room temperature in the dark and then quenched with a final concentration of 40 mM Dithiothreitol (DTT). After quenching, 12% phosphoric acid was added to a final concentration of 1.2%. Followed by 1:7 dilution (v/v) with 90% methanol, 0.1M Ambic pH 7.9. The samples were then placed into the S-Trap spin column and centrifuged at 4000×g for 30 sec. Then washed three times with 150 μL 90% methanol, 0.1 M Ambic 7.9. Digestion was performed with 125 L LysC at 120 ng/L (1:10 w/w) in 0.1 M Ambic added to the top of the spin column. LysC solution absorbed into the highly hydrophilic matrix, the spin columns and incubated overnight (16 hrs) at 37° C. Following incubation, the digested peptides were eluted off the S-trap column sequentially with 40 μL each of 50 mM TEAB pH 8.5 followed by 0.2% formic acid and finally, 50% acetonitrile-0.2% formic acid. Three eluted peptides washes were pooled together and evaporated to dryness by a Speedvac SC110 (Thermo Savant, Milford, MA). Half (15 μg) of the Lys-digested peptides were reconstituted and digested with 33 μL chymotrypsin at 60 ng/L in 50 mM Ambic (1:7.5 w/w) at 37° C. for 16 hrs. The digestion was stopped by adding 10 μL 5% FA and evaporated to dryness.

[0376] The double digested peptides were reconstituted in 150 μL of 0.5% formic acid (“FA”) and 2.5 μL were injected to the nanoLC-MS/MS system. The LysC-chymotryptic peptides were eluted in a 60 min gradient of 5% to 33% ACN-0.1% FA at 300 nL/min. The operation of Orbitrap Fusion was basically same as described above, with an additional EThcD MS2 scan in ion trap for 3-7 charged ions that was toggled with the CID MS2 scan for 2-3 charged ions in 3-second “Top Speed” workflow. The calibrated ETD parameters (reaction time and maximal reagent injection time) were applied for ETD supplemented with an additional 20% HCD activation energy to yield EThcD MS2 spectra.

[0377] By combining the results for both the LysC and chymotrypsin sequential digestion and the trypsin single digestion, 97.1% sequence coverage of the target sequence was obtained. The nucleotides in the reconstructed sequence were confirmed as 100% identical to the relevant portion of the human collagen III protein.

### Example 5: Ex-Vivo Hydroxylation Reaction and Analysis Reaction

[0378] Fermentation supernatant containing unhydroxylated 50 kDa human collagen having an amino acid sequence according to SEQ ID NO: 986 (the unhydroxylated “50 kDa human collagen fragment”) was partially purified using salt precipitation. Ammonium sulfate was added to the precipitate as salt to a final concentration of 800 mM, the pH was adjusted to 4±0.05 with 50% sulfuric acid the supernatant was then incubated at room temperature with mixing for 30 minutes. The 50 kDa human collagen fragment was recovered from the supernatant by centrifuging at 17000×g and the resulting pellet was resuspended in half the volume of DI water.

[0379] The PP547 cell mass was resuspended separately in the Lysis Buffer (50 mM sodium phosphate) to a 30-45% w/w concentration. The pH of the lysis feed was adjusted to 9±0.05 with 2M Citric Acid and/or 2M Sodium Hydroxide. This feed was then lysed in a bead meal according to standard lysis times, volumes and cleaning methods.

[0380] The lysis product was mixed together with the purified supernatant containing the 50 kDa human collagen fragment on a magnetic stirrer with gentle stirring and then 25-65 mM AKG, 25-65 mM DTT, and 2-5 mM Ascorbic acid were added as dry powders. During addition of AKG, DTT, and Ascorbate, the pH was constantly measured and adjusted to avoid going below pH 6.5±0.05 (pH<6.5 inactivates the P4H enzyme). Subsequently 0.1-0.25 mM ferrous sulfate was added from a 0.5M freshly prepared stock solution. This reaction feed was then transferred to a reaction vessel outfitted with pH control, temperature control, mixing control, and aeration control. Once the reaction feed was added to the vessel, aeration was set to 1-2 vvm, mixing to 150-500 rpm depending on tank OTR configuration, temperature control to 26-32° C. and pH control to 7.5±0.05. After 5 hours of reaction, the vessel pH was adjusted to 4±0.05 through automated addition of 2M citric acid, the temperature of the reaction vessel was adjusted to 20-26° C. and nitrogen was sparged through the system to maintain zero dissolved oxygen (DO). After 16 hours of incubation at the aforementioned conditions, primary clarification was performed by centrifuging the reaction product at 17000×g. Following primary clarification, diatomaceous earth was used in a cake filtration system to perform secondary clarification. The clarified reaction product was cooled to 12° C. and concentrated in an ultrafiltration system with a 10 kDa cutoff to reduce the volume by a factor of 10-15. Hydroxylated 50 kDa collagen fragment is then precipitated from the solution using 800 mM sodium sulfate. In some cases, further precipitation can be performed using 1M sodium chloride. Precipitated protein was then resuspended in DI water and the residual salt was removed by diafiltration using a 10 kDa cutoff using one of 0.01 N HCl, 0.001 N HCl, or DI water, depending on the final application of the 50 kDa human collagen fragment. As a final step, the diafiltration product was clarified by further centrifuging at 17,000×g for 10 minutes to remove all particulate material. FIG. 8 shows the percent hydroxylation of the 50 kDa human collagen fragment achieved over time during this ex vivo hydroxylation reaction. FIG. 9A and FIG. 9B show thermograms of the 50 kDa human collagen fragment before and after hydroxylation, respectively.

### Hydrolyzed Peptide Analysis

[0381] The final purified product contains native proteases that are co-purified with the 50 kDa human collagen fragment. Incubation at room temperature (T=25° C.) allows the proteases to further hydrolyze the 50 kDa human collagen fragment to produce short collagen peptides. The final product was incubated at room temperature for three weeks to study the rate and extent of hydrolysis. The samples were analyzed with mass spectrometry after one and three weeks of incubation at room temperate (T=25° C.). (FIG. 4). No enzymatic digestion was performed in order to check the relative abundance and sequence of the short collagen peptides. MS spectra revealed that the peptide distribution was unchanged after the first week with nearly 70% of short peptides (1-6 kDa) being of 1 to 1.5 kDa in length. Peptides larger than 6 kDa were not measured in this analysis. Mapping the peptides revealed that the detected peptides covered 97% of the sequence of the initial recombinant collagen amino acid sequence (SEQ ID NO: 986). The peptides identified by mass spectrometry after one week of incubation are provided in Table 1 above. The peptides identified by mass spectrometry after three weeks of incubation are provided in Table 2 above.

### Example 6: Stimulation of Collagen I and Collagen III Synthesis by Truncated Human Collagen III in Fibroblast Cells

[0382] A fibroblast cell culture model was used to assess the ability of the test materials to exert an effect on collagen synthesis. This study also assessed the viability of the cells after exposure to the test materials.

### MTT Assay

[0383] Changes in cell number can be assessed via an MTT assay. The MTT assay is a colorimetric analysis of the metabolic activity of the cell, which is a reflection of the number of viable cells. Reduction of MTT by mitochondria results in the formation of insoluble purple formazin crystals that are extracted from the cells with isopropanol and quantified spectrophotometrically. The intensity of the purple color is directly proportional to the metabolic activity of the cells and inversely proportional to the toxicity of the test material.

[0384] Fibroblasts were seeded into the individual wells of a 24-well plate in 0.5 ml of Fibroblast Growth Media (FGM) and incubated overnight at 37±2° C. and 5±1% CO₂. On the following day the media was removed via aspiration to eliminate any non-adherent cells and replaced with 0.5 ml of fresh FGM. The cells were grown until confluent, with a media change every 48 to 72 hours. Upon reaching confluency the cells were treated for 24 hours with DMEM supplemented with 1.5% FBS to wash out any effects from the growth factors included in the normal culture media. After this 24-hour wash out period the cells were treated with the test materials at the specified concentrations (see FIG. 11A and FIG. 11B) dissolved in FGM with 1.5% FBS. TGF-B (50 ng/ml) was used as a positive control for inducing collagen expression. Untreated cells (negative controls) just received DMEM with 1.5% FBS. As a negative control, cells were treated with 100 μM bDcAMP in FGM with 1.5% FBS. The cells were incubated for 48 hours and at the end of the incubation period cell culture medium was collected and either stored frozen (−75° C.) or assayed immediately. Materials were tested in triplicate.

[0385] The samples tested were an unhydroxylated 50 kDa fragment of type III human collagen (SEQ ID NO: 986) (“hcol III 50 kDa unhydroxylated”), a hydroxylated (28%) 50 kDa fragment of type III human collagen (also SEQ ID NO: 986) (“hcol III 50 kDa; 28% hydroxylated”), full-length bovine collagen 3 with hydroxylation (7%) (“full-length bcol 3”), marine collagen (Ashland), acacia collagen (Lipoid Kosmetik AG), recombinant human collagen 21 (Geltor) (“HumColl21”), BIOLLAGEN (Jland Biotech), and full length type III bovine collagen with hydroxylation (45%) (“full-length bcol3”). Each collagen sample was diluted at a range of percent concentrations in the tissue culture media, FGM with 1.5% FBS (see FIG. 11A and FIG. 11B). The unhydroxylated 50 kDa fragment of type III human collagen (SEQ ID NO: 986) was tested at 0.1%, 0.05%, 0.01%, 0.005%, and 0.001% by weight in the culture media. The hydroxylated 50 kDa fragment of type III human collagen (SEQ ID NO: 986) was tested at 0.01%, 0.005%, 0.001%, 0.0005%, and 0.0001% by weight in the culture media. The full length type III bovine collagen with 7% hydroxylation was tested at 0.05%, 0.01%, 0.005%, 0.001%, and 0.0005% by weight in the culture media. The marine collagen was tested at 1%, 0.5%, 0.01%, 0.05%, and 0.01% by weight in the culture media. The acacia collagen was tested at 1%, 0.5%, 0.01%, 0.05%, and 0.01% by weight in the culture media. The human collagen 21 was tested at 0.1%, 0.05%, 0.01%, 0.005%, and 0.001% by weight in the culture media. The human collagen 21 was tested at 0.1%, 0.05%, 0.01%, 0.005%, and 0.001% by weight in the culture media. The human collagen 21 was tested at 0.1%, 0.05%, 0.01%, 0.005%, and 0.001% by weight in the culture media. The full length bovine type III collagen with 45% hydroxylation was tested at 0.015%, 0.003%, 0.0015%, 0.0003%, and 0.00015% by weight in the culture media.

[0386] After the 2-day incubation, the cell culture medium was removed (see above) and the fibroblasts were washed twice with PBS to remove any remaining test material. After the final wash, 500 μl of DMEM supplemented with 0.5 mg/ml MTT was added to each well and the cells were incubated for 1 hour at 37±2° C. and 5±1% CO₂. After the incubation, the DMEM/MTT solution was removed and the cells were washed again once with PBS and then 0.5 ml of isopropyl alcohol was added to the well to extract the purple formazin crystals. Two hundred microliters of the isopropyl extracts were transferred to a 96-well plate and the plate was read at 540 nm using isopropyl alcohol as a blank. The mean MTT absorbance value for the negative control cells was calculated and used to represent 100% cell viability. The individual MTT values from the cells undergoing the various treatments were then divided by the mean value for the negative control cells and expressed as a percent to determine the change in cell viability caused by each treatment.

[0387] The results of the MTT assay are shown in FIG. 11A and FIG. 11B. As shown, none of the tested collagens were observed to impact cell viability. Each treated sample of cells were at least as viable as untreated control cells.

### Type I Collagen Assay

[0388] Fibroblasts are the main source of the extracellular matrix peptides, including collagen. Procollagen is a large peptide synthesized by fibroblasts in the dermal layer of the skin and is the precursor for collagen. As procollagen is processed to form a mature collagen protein, a propeptide portion is cleaved off in the form of a type I C-peptide. Both the mature collagen protein and the type I C-peptide fragment are then released into the extracellular environment. As collagen is synthesized the type I C-peptide fragment accumulates in the tissue culture medium. Since there is a 1:1 stoichiometric ratio between the two parts of the procollagen peptide, assaying for type I C-peptide reflects the amount of collagen synthesized. To measure the effects of different forms of collagen on collagen synthesis and secretion, Type 1 C-peptide was assayed via an ELISA based method.

[0389] Fibroblasts were seeded into the individual wells of a 24-well plate in 0.5 ml of Fibroblast Growth Media (FGM) and incubated overnight at 37±2° C. and 5±1% CO₂. On the following day the media was removed via aspiration to eliminate any non-adherent cells and replaced with 0.5 ml of fresh FGM. The cells were grown until confluent, with a media change every 48 to 72 hours. Upon reaching confluency the cells were treated for 24 hours with DMEM supplemented with 1.5% FBS to wash out any effects from the growth factors included in the normal culture media. After this 24-hour wash out period the cells were treated with the test materials described below at the specified concentrations (see FIGS. 12A and 12B) dissolved in FGM with 1.5% FBS. TGF-B (50 ng/ml) was used as a positive control for inducing collagen expression. Untreated cells (negative controls) just received DMEM with 1.5% FBS. The cells were incubated for 48 hours and at the end of the incubation period cell culture medium was collected and either stored frozen (−75° C.) or assayed immediately. Materials were tested in triplicate.

[0390] The samples tested were an unhydroxylated 50 kDa fragment of type III human collagen (SEQ ID NO: 986), a hydroxylated (28%) 50 kDa fragment of type III human collagen (also SEQ ID NO: 986), full-length bovine collagen 3 with hydroxylation (7%), marine collagen (Ashland), acacia collagen (Lipoid Kosmetik AG), recombinant human collagen 21 (Geltor), BIOLLAGEN (Jland Biotech), and full length type III bovine collagen with hydroxylation (45%). Each collagen sample was diluted at a range of percent concentrations in the tissue culture media, FGM with 1.5% FBS (see FIG. 11A and FIG. 11B). The unhydroxylated 50 kDa fragment of type III human collagen (SEQ ID NO: 986) was tested at 0.1%, 0.05%, 0.01%, 0.005%, and 0.001% by weight in the culture media. The hydroxylated 50 kDa fragment of type III human collagen (SEQ ID NO: 986) was tested at 0.01%, 0.005%, 0.001%, 0.0005%, and 0.0001% by weight in the culture media. The full length type III bovine collagen with 7% hydroxylation was tested at 0.05%, 0.01%, 0.005%, 0.001%, and 0.0005% by weight in the culture media. The marine collagen was tested at 1%, 0.5%, 0.01%, 0.05%, and 0.01% by weight in the culture media. The acacia collagen was tested at 1%, 0.5%, 0.01%, 0.05%, and 0.01% by weight in the culture media. The human collagen 21 was tested at 0.1%, 0.05%, 0.01%, 0.005%, and 0.001% by weight in the culture media. The human collagen 21 was tested at 0.1%, 0.05%, 0.01%, 0.005%, and 0.001% by weight in the culture media. The human collagen 21 was tested at 0.1%, 0.05%, 0.01%, 0.005%, and 0.001% by weight in the culture media. The full length bovine type III collagen with 45% hydroxylation was tested at 0.015%, 0.003%, 0.0015%, 0.0003%, and 0.00015% by weight in the culture media.

[0391] For the ELISA assay, a series of type I C-peptide standards was prepared ranging from 0 ng/ml to 640 ng/ml. Next, an ELISA microplate was prepared by removing any unneeded strips from the plate frame followed by the addition of 100 μl of peroxidase-labeled anti procollagen type I-C peptide antibody to each well used in the assay. Twenty (20) μl of either sample (collected tissue culture media) or standard was then added to appropriate wells and the microplate was covered and allowed to incubate for 3±0.25 hours at 37° C.

[0392] After the incubation the wells were aspirated and washed three times with 400 μl of wash buffer. After the last wash was removed 100 μl of peroxidase substrate solution (hydrogen peroxide+tetramethylbenzidine as a chromagen) was added to each well and the plate was incubated for 15±5 minutes at room temperature. After the incubation 100 μl of stop solution (1 N sulfuric acid) was added to each well and the plate was read using a microplate reader at 450 nm. To quantify the amount of each substance present, a standard curve was generated using known concentrations of each substance. A regression analysis was performed to establish the line that best fits these data points. Absorbance values for the test materials and untreated samples were used to estimate the amount of each substance present in each sample. Treatment means were compared using an ANOVA, with an n=3 per treatment. Statistical significance was set at p<0.05.

[0393] The results of the type I collagen assay are shown in FIG. 12A and FIG. 12B. These results were obtained after treating cells with a range of percent by weight concentrations of each collagen solution. These data show that 0.1% of the 50 kDa fragment of human collagen (SEQ ID NO: 986) unexpectedly increased the amount of Type I collagen secreted by the treated fibroblasts. Treatment with 0.1% by weight (final concentration) of the 50 kDa fragment of human collagen increased collagen I expression by over 200% relative to untreated cells. While the effect was observed with the unhydroxylated 50 kDa fragment of human collagen (SEQ ID NO: 986) but not the hydroxylated collagen, this difference is attributable to the hydroxylated collagen not being tested at the highest concentration (0.1%). The cells were separately treated with equivalent or even higher concentrations of a range of different collagens. The cells were treated with a range of collagens of similar size to, or smaller than, the 50 kDa fragment of human collagen, particularly hydrolyzed marine collagen, acacia collagen, human collagen 21, and BIOLLAGEN. These collagens of similar size had no effect on collagen I production, even when those collagens were tested at up to 10-fold higher percent concentrations than the 50 kDa fragment. The cells were treated with full length bovine collagen III, both when it was approximately 7% hydroxylated and when it was approximately 45% hydroxylated. Full length bovine collagen III was able to induce collagen I expression, but only when it was highly hydroxylated (˜45%). Therefore, these data indicate that compositions comprising the 50 kDa fragment of human collagen are useful when increased production of type I collagen is desired.

### Type III Collagen Assays

[0394] Type III collagen is synthesized by dermal fibroblasts as a large pro-peptide. As the peptide is processed to form a mature type III collagen protein, a pro-peptide portion is cleaved off (type III N-peptide). Both the mature collagen protein and the type III N-peptide fragment are then released into the extracellular environment. As collagen is synthesized the type III N-peptide fragment accumulates in the tissue culture medium. Since there is a 1:1 stoichiometric ratio between the two parts of the procollagen peptide, assaying for type III N-peptide reflects the amount of collagen synthesized. To measure the effects of different forms of collagen on collagen synthesis and secretion, Type III N-peptide was assayed via an ELISA based method.

[0395] Fibroblasts were seeded into the individual wells of a 24-well plate in 0.5 ml of Fibroblast Growth Media (FGM) and incubated overnight at 37±2° C. and 5±1% CO₂. On the following day the media was removed via aspiration to eliminate any non-adherent cells and replaced with 0.5 ml of fresh FGM. The cells were grown until confluent, with a media change every 48 to 72 hours. Upon reaching confluency the cells were treated for 24 hours with DMEM supplemented with 1.5% FBS to wash out any effects from the growth factors included in the normal culture media. After this 24-hour wash out period the cells were treated with the test materials described below at the specified concentrations (see FIGS. 13A and 13B) dissolved in FGM with 1.5% FBS. TGF-B (50 ng/ml) was used as a positive control for inducing collagen expression. Untreated cells (negative controls) just received DMEM with 1.5% FBS. The cells were incubated for 48 hours and at the end of the incubation period cell culture medium was collected and either stored frozen (−75° C.) or assayed immediately. Materials were tested in triplicate.

[0396] The samples tested were an unhydroxylated 50 kDa fragment of type III human collagen (SEQ ID NO: 986), a hydroxylated (28%) 50 kDa fragment of type III human collagen (SEQ ID NO: 986), full-length bovine collagen 3 with hydroxylation (7%), marine collagen (Ashland), acacia collagen (Lipoid Kosmetik AG), recombinant human collagen 21 (Geltor), BIOLLAGEN (Jland Biotech), and full length type III bovine collagen with hydroxylation (45%). Each collagen sample was diluted at a range of percent concentrations in the tissue culture media, FGM with 1.5% FBS (see FIG. 11A and FIG. 11B). The unhydroxylated 50 kDa fragment of type III human collagen (SEQ ID NO: 986) was tested at 0.1%, 0.05%, 0.01%, 0.005%, and 0.001% by weight in the culture media. The hydroxylated 50 kDa fragment of type III human collagen (SEQ ID NO: 986) was tested at 0.01%, 0.005%, 0.001%, 0.0005%, and 0.0001% by weight in the culture media. The full length type III bovine collagen with 7% hydroxylation was tested at 0.05%, 0.01%, 0.005%, 0.001%, and 0.0005% volume in the culture media. The marine collagen was tested at 1%, 0.5%, 0.01%, 0.05%, and 0.01% volume in the culture media. The acacia collagen was tested at 1%, 0.5%, 0.01%, 0.05%, and 0.01% volume in the culture media. The human collagen 21 was tested at 0.1%, 0.05%, 0.01%, 0.005%, and 0.001% volume in the culture media. The human collagen 21 was tested at 0.1%, 0.05%, 0.01%, 0.005%, and 0.001% volume in the culture media. The human collagen 21 was tested at 0.1%, 0.05%, 0.01%, 0.005%, and 0.001% volume in the culture media. The full length bovine type III collagen with 45% hydroxylation was tested at 0.015%, 0.003%, 0.0015%, 0.0003%, and 0.00015% volume in the culture media.

[0397] For the ELISA assay, a series of standards was prepared and 100 μl of these standards or samples were added to the wells of the type III collagen ELISA plates. The plates were then incubated at 37° C. for 1.5 hours. After this incubation the ELISA plates were then washed twice with wash buffer, followed by the application of 100 μl of detection antibody solution. The ELISA plates were then incubated for 1 hour at 37° C. After the incubation all of the ELISA plates were washed with wash solution followed by the addition of 100 μl of HRP conjugate solution and incubated at 37° C. for 30 minutes. After this incubation the ELISA plates were again washed and 100 μl of substrate solution was added to each well and the well-plates were incubated for 10-30 minutes at room temperature to allow the color generation reaction to occur. At the end of the color generation reaction 100 μl of stop solution was added to each well and the plates were read at 460 nm using a plate reader. To quantify the amount of each substance present, a standard curve was generated using known concentrations of each substance. A regression analysis was performed to establish the line that best fits these data points. Absorbance values for the test materials and untreated samples were used to estimate the amount of each substance present in each sample. Treatment means were compared using an ANOVA, with an n=3 per treatment. Statistical significance was set at p<0.05.

[0398] The results of the type III collagen assay are shown in FIG. 13A and FIG. 13B. These results were obtained after treating cells with a range of percent by weight concentrations of each collagen solution. These results show that treatment with 0.1% the 50 kDa fragment of human collagen (SEQ ID NO: 986) unexpectedly increased the amount of Type III collagen secreted by the treated fibroblasts by over 200% relative to untreated cells. A smaller but still significant effect was also observed after treatment with 0.01% of the 50 kDa fragment of human collagen (SEQ ID NO: 986; both hydroxylated and unhydroxylated). No effect on collagen III production was observed after treatment with bovine collagen III (7% hydroxylated), acacia collagen, human collagen 21, or BIOLLAGEN, even when those collagens were tested at up to 10-fold higher percent concentrations than the 50 kDa fragment. Full length bovine collagen III was able to induce collagen I expression, but only when it was highly hydroxylated (˜45%). The marine collagen induced an effect on collagen III expression only when tested at a 10-fold higher percent concentration than the 50 kDa fragment of human collagen. Therefore, these data indicate that compositions comprising the 50 kDa fragment of human collagen are useful when increased production of type III collagen is desired.

### Example 7: Additional Characterization of Truncated Human Collagen III Fragment

[0399] Additional assays were conducted on the 50 kDa fragment of human collagen (SEQ ID NO: 986) to further characterize the fragment.

### Physical Properties

[0400] The purified unhydroxylated and purified hydroxylated preparations of the 50 kDa fragment of human collagen (SEQ ID NO: 986) were evaluated with regards to their solubility and character in various solutions. These properties were compared to those of full length bovine collagen 3. The following samples were each dissolved at a 1% by weight concentration in deionized water, with 1% phenoxyethanol for preservation:
[0401] 1. Unhydroxylated human collagen 3 50 kDa fragment
[0402] 2. Hydroxylated (28%) human collagen 3 50 kDa fragment
[0403] 3. Full-length bovine collagen 3 with 7% hydroxylation
[0404] 4. Full-length bovine collagen 3 with 45% hydroxylation

[0405] The dissolved collagen solutions were compared against COLLUME (2%; Geltor), human collagen 21 (2%; Geltor), and marine collagen NPNF (Tri-K), each treated in the same way. The results of the analysis are shown in FIG. 14. The tested 50 kDa collagen fragments were soluble and non-viscous, with little to no color or odor.

[0406] The four collagen samples were also added at 3% by weight into seven base formulations to test compatibility and performance. Those base solutions were a gel (carbomer system), a serum (ammonium acryloyldimethyltaurate/VP copolymer and acrylates/C10-30 alkyl acrylate crosspolymer system), a cream emulsion (oil/water), hair conditioner (containing cetrimonium chloride and behentrimonium methosulfate), Shampoo/Cleanser (Sulfate-Free), water-based toner, and alcohol-based toner. The unhydroxylated collagen was compatible with all base formulations tested, while the hydroxylated collagen was compatible with all base formulations except the alcohol-based toner. Moreover, the 50 kDa human collagen fragment displayed more compatibilities than the full length bovine collagen across the range of tested base formulations.

[0407] These results demonstrate that the 50 kDa fragment of human collagen is a viable material with potential applications in personal care formulas, provided that it is properly incorporated into the appropriate formulations. In general, it exhibited good color and odor and could easily be incorporated into the tested formulas. The characteristics of the collagen fragment provide possible benefits in skin care formulations in terms of enhanced elasticity, wrinkle reduction, smoothing, moisture-loss prevention, firming, and film forming. There was no observed upper limit on the use level of these materials in certain formula types in regards to aesthetics or compatibility. There was no negative skin feel observed for any of the 1% solutions at any included level.

### HRIPT Test for Skin Irritation

[0408] To determine the irritation and sensitization (contact allergy) potential of the 50 kDa human collagen fragment (SEQ ID NO: 986), a volunteer study was performed in which collagen solutions were repeatedly applied to human skin. The study involved testing of both hydroxylated and unhydroxylated collagen fragment solution.

[0409] Patches containing 7.5 mm paper discs were soaked in a solution containing 2% by weight of the 50 kDa human collagen fragment (SEQ ID NO: 986). The patches were then affixed directly to the skin of the intrascapular regions of the back, to the right of left of the midline and subjects were dismissed with instructions not to wet or expose the test area to direct sunlight. One patch was administered for each collagen solution being tested to each patient. Patches remained in place for 48 hours after the first application. Subjects were instructed not to remove the patches prior to their 48 hour scheduled visit. Thereafter, subjects were instructed to remove patches 24 hours after application for the remainder of the study. The procedure was repeated until a series of nine consecutive, 24 hour exposures had been made three times a week for three consecutive weeks. Prior to each reapplication, the test sites were evaluated by trained laboratory personnel. Following a 10-14 day rest period, a retest/challenge dose was applied once to a previously unexposed test site. Retest sites were evaluated by trained laboratory personnel 48 and 96 hours after application.

[0410] No adverse events of any kind were reported during the course of the study in any of the 55 test subjects, for either collagen solution. In comparison, administration of a positive control (2% sodium lauryl sulfate solution) resulted in one subject with a grade 4 reaction (erythema, induration, and bulae) and three subjects with a grade 1 reaction (erythema throughout at least three quarters of the patch area. Therefore, there was no indication of a potential to elicit dermal irritation or sensitization (contact allergy) noted for the 50 kDa human collagen fragment.

### Example 8: Application of Cosmetic Compositions

[0411] To characterize the effects of application of the 50 kDa human collagen fragment (SEQ ID NO: 986) on human skin, a volunteer study was performed in which collagen solutions were repeatedly applied to human skin. Two different formulations were applied, each of which comprised the 50 kDa human collagen fragment in a composition comprising 1.5% xantham gum (Kelltrol® CG-BT), 0.2% potassium sorbate, 0.3% sodium benzoate, and 0.05% citric acid, with a pH of 5.2. Formulation 1 comprised a final concentration of 0.05% of the 50 kDa human collagen fragment, while formulation 2 comprised a final concentration of 0.002% of the 50 kDa human collagen fragment solution. Twenty-five subjects applied formulation 1 on a daily basis for 12 weeks, while 24 subjects applied formulation 2 on a daily basis for 12 weeks.

[0412] Objective clinical efficacy assessments were performed by an expert clinical grader both before the start of application, after 6 weeks, and after 12 weeks of application. The grader examined the skin for: texture and smoothness (visual), skin tone evenness, firmness (visual), radiance, sagging, and lines/wrinkles, using 10-Point Ordinal Scales on the Face. The results of these assessments are shown in FIG. 16A, with respect to the degree of improvement. A statistical significant improvement was observed after 6 and 12 weeks of product use of dose 1 and dose 2 for skin texture/smoothness (visual), skin tone evenness, firmness (visual), sagging and lines/wrinkles. For radiance, a statistically significant improvement was observed after 6 and 12 weeks of products use of dose, but ony after 12 weeks of products use of dose 2.

[0413] The subjects also performed subjective self-assessments after six and after 12 weeks of application. These assessments took the form of a series of questions presented to the subjects as listed in FIGS. 16B and 16C. Broadly, both formulation 1 and formulation 2 were consistently characterized as leading to improvements in skin condition with greater than 50% of patients noting improvements (i.e., agree or strongly agree) with respect to almost all questions.

[0414] Spectrophotometric Intracutaneous Analysis (SIA) was performed using a SIAscope® (Astron Clinica Ltd.) to determine the levels of collagen within the skin both before and after 6 and 12 weeks of application of either formulation 1 or formulation 2. As shown in FIG. 16D, application of both formulation 1 and formulation 2 lead to an 18% increase in collagen levels after six weeks of application and to a 25% increase in collagen after 12 weeks of application, with almost all patients having some improvement in collagen.

[0415] Cutometer MPA 580 (Courage+Khazaka, Germany) was used to measure the viscoelastic properties of the skin (firmness and elasticity) by applying suction to the skin surface. A statistically significant reduction of RO was observed after 12 weeks of product use compared to T0 for dose 1, indicating improvement of skin firmness. A statistically significant increase of elasticity was observed after 6 and 12 weeks of product use compared to T0 for Dose 1 and 2.

### Example 9: Generation of Truncated Human Collagen III Fragment Sequence Variants

[0416] Plasmids encoding secretion signal-secreted human collagen variants having amino acid sequences according to SEQ ID NO: 987-1015 were constructed. The plasmid DNA is set forth in the nucleic acid sequences according to SEQ ID NOs: 1045-1073.

[0417] Each plasmid was transformed into the PP97 Pichia pastoris (Komagataella phaffii) strain by electroporation with the BIO-RAD GENE PULSER XCELL Total System as in Example 1. The resulting strains were used to express the variants. In some cases, the strains were doubly transformed to improve the recombinant protein expression. Then, the three-step fermentation process of Example 2 was utilized.

### Example 10: Preparation and Analysis of Collagen Variant Samples

### Preparation of Samples

### Fermentation Harvest

[0418] The fermentation broth was removed from the fermenter and mixed broth at ˜200-400 RPM to ensure the solution was homogenous. Then, the cells were removed from the fermentation supernatant. The broth was transferred into 1 L Sorvall bottles and spun down at max speed (17,568 g) for 20 min at 20° C. The supernatant was decanted into a 1-5 L container and the pellets were discarded. The fermentation supernatant was stored in the −20° C. freezer, until ready to use.

### pH and Ammonium Sulfate Precipitation and Recovery

[0419] The fermentation supernatant was thawed in a room temperature water bath. 1 M ammonium sulfate was added to the fermentation supernatant, which was then mixed at ˜200-400 RPM to ensure the solution was homogenous. The amount of ammonium sulfate mass required to target a concentration of 1 M was calculated and added according to the equation below. Density=1.07 kg/L

$$Mass of salt ( kg ) = \frac{\frac{Desired Molarity ( \frac{mol}{L} ) * Mass Feed ( kg )}{Density ( \frac{kg}{L} )}}{\frac{1000}{Salt Molecular weight ( \frac{g}{mol} )} - \frac{Desired Molarity ( \frac{mol}{L} )}{Density ( \frac{kg}{L} )}} \\ Density = 1.07 kg / L$$

[0420] The pH was adjusted to 4±0.05 using 50% sulfuric acid. And the solution was incubated for 30 minutes while mixing at ˜200-400 RPM to ensure the solution was homogenous. The pH was checked again and adjusted back to pH 4±0.05, if necessary, by addition of 50% sulfuric acid or 10 N NaOH. The pH/salt precipitated pellet was recovered. The solution was transferred into 1 L Sorvall bottles and spun down at max speed (17,568 g) for 20 min at 4° C. Then, the supernatant was decanted into a beaker the waste was discarded. The precipitated protein pellet was resuspend in water and the fermentation supernatant was stored in the −20° C. freezer until ready to use.

### Ultra Diafiltration

[0421] The resuspended protein solution was thawed in a room temperature water bath. The system was set up with 10 kD hollow fiber filters and a water flux test was performed. The 0.1 N NaOH storage solution was drained from the membrane housing and disposed and the system was flushed with water. The clean water flux at a Transmembrane pressure (TMP) of approximately 3, 5, & 10 psi was performed. Then, 10× phosphate saline solution was added to the resuspended pellet and the pH was adjusted. The solution was mixed at ˜200-400 RPM until the solution was homogenous. The amount of 10×PBS was calculated and added to achieve a final concentration of 1× according to the equation below. *Assume density=1 g/mL

$$Volume of 10 X PBS to add = \frac{Mass solution}{9}$$

[0422] The pH was adjusted to 7.2, if necessary, by addition 10 N NaOH. Any insoluble particles were removed and the solution was transferred into 1 L Sorvall bottles and spun down at max speed (17,568 g) for 20 min at 4° C. The supernatant was decanted into a beaker for further processing and the pellet waste was discarded. The resuspended protein solution was concentrated by setting the pump to 1020 mL/min, applying back pressure to achieve a transmembrane pressure (TMP) of 20-25 psi, and concentrating until 200 mL.

[0423] The concentrated protein solution was diafiltered with 3 diavolumes of water by setting the pump to 1020 mL/min, applying back pressure to achieve a TMP of 20-25 psi, and diafiltering against water until 3 diavolumes was achieved. A check was performed to confirm the total solids were >1.5%. If the total solids were <1.5%, the protein solution was concentrated to minimal volume (˜75 mL). The product was retrieved from the system and stored in the −20° C. freezer until ready to use. A water flush was performed, the system underwent clean in place solution (CIP) with 1% CIP 100 solutions and the membrane was put in in 0.1 M Sodium hydroxide storage solutions.

### Formulation

[0424] The diafiltered protein solution was thawed in a room temperature water bath and 10× Phosphate Buffered Saline (PBS) was added. The solution was mixed at ˜200-400 RPM until the solution was homogenous. The amount of 10× Phosphate Buffered Saline (PBS) volume required to target a final concentration of 1× was calculated using the excel calculator.

$$Mass of PBS ( mL ) = \frac{Starting mass ( g )}{9} \\ * Assume density = 1 g / mL$$

[0425] The pH was adjusted to 7.2±0.1 (pH 7.1-7.3) using concentrated hydrochloric acid (HCl) or 10 N sodium hydroxide (NaOH). The final formulated product was vacuum sterile filtered with a 0.2 μm sterile bottle top filter in a biosafety cabinet and evaluated.

### Data Collection Methods

### SDS-PAGE of the Protein

[0426] The pH was adjusted to 7.2±0.1 (pH 7.1-7.3) using concentrated hydrochloric acid (HCl) or 10 N sodium hydroxide (NaOH). The final formulated product was vacuum sterile filtered with a 0.2 μm sterile bottle top filter in a biosafety cabinet and evaluated.

[0427] Protein quantification, monitoring and detection was provided by electrophoretic separation via Sodium dodecyl sulfate-Polyacrylamide gel electrophoresis (SDS-PAGE). Standards were gravimetrically prepared at a concentration of 0.25 g/L, 0.125 g/L and 0.0625 g/L to create a standard curve. Working solutions of each standard were stored at 4° C. Based on estimated concentrations, samples were diluted using DI water to fit within the standard curve. Lithium dodecyl sulfate (LDS) running buffer was added in a 1:1 solution with each individual standard and sample. It was heated to breakdown disulfide bonds and denature the protein so it could pass through the pores of the Tris acetate gel. The tris acetate gel was placed into a Midi Gel tank. Tris-acetate buffer (1×) was added to the gel box. In an SDS-PAGE, each gel contained the following: Molecular weight marker, standard curve points, samples, and positive control. Once standards and samples were loaded in the gel wells, the gel box was covered by the power cables connected to the Electrophoresis for one hour and twenty minutes at 125 Volts and 300 Watts.

[0428] The gel was removed from the plastic case and placed in the Licor incubation box to undergo the two-hour staining process using Page-Blue protein staining solution and placed on an orbital shaker with gentle agitation.

[0429] The Page-Blue solution was washed off and the gel begins the de-staining process using 10% methanol. The gel incubated for 60 minutes with gentle agitation on an orbital shaker. Then, the methanol was washed off and the gel continued to de-stain using Millipore water. The gel incubated for 60 minutes with gentle agitation on an orbital shaker.

[0430] Using the Image lab Densitometer, an image scan of the gel was taken. Samples positive for the expression of collagen protein had a strong band migrating at the appropriate molecular weight corresponding with the positive control. These bands were analyzed using the application “app v2.01 TT”. A CSV excel file was created and added to the corresponding “qSDS template”

[0431] Using statistical control charts, each gel underwent quality control checks to ensure all system suitability parameters were met before reporting data.

### Sequence Verification of Protein (LC/MS Analysis):

[0432] Before sequence verification by LC/MS, all protein samples were digested as described in the above section: Enzymatic digestion of protein (for LC/MS analysis). Following enzymatic digestion, the identified peptide sequences of digested peptides were matched against the theoretical protein sequence to calculate sequence coverage % (calculated by dividing the number of amino acids in all found peptides by the total number of amino acids in the entire protein sequence). The sequence coverage maps and detected maps for the target variant protein identified in each sample were generated using Byonic software (Protein Metrics Inc., San Carlos, CA) for visualization.

[0433] In addition to total sequence coverage %, an additional sequence verification calculation, potential sequence coverage %, was computed to address identification limitations of the LC/MS instrument. This calculation omits peptides present in the digested sample that were too small to be detected by the LC/MS instrument in its current settings. As such, potential sequence coverage % was calculated to be the total number of amino acids in all found peptides divided by the total number of amino acids in peptides that are possible to be detected by the LC/MS in its current acquisition mode. The % sequence unaccounted for was calculated as the complement of potential sequence coverage %, representing the portions of the protein sequence that, based upon tryptic digestion rules, should be seen post-digestion, but have no matched peptides.

### Glycosylation Analysis of Protein (LC/MS Analysis):

[0434] Before sequence verification by LC/MS, all protein samples were digested as described in the above section: Enzymatic digestion of protein (for LC/MS analysis). Following enzymatic digestion, the mass spectrum raw data, Agilent *.d files were processed using Byonic and Byologic software (Protein Metrics Inc., San Carlos, CA) and were searched against respective in-house variant protein sequences. Byonic search parameters were set to include peptides cleaved C-terminal to Arg and Lys residues, with fully-specific trypsin digestion, allowing up to two missed cleavages. Precursor mass tolerance was set to 10 ppm with fragment mass tolerance at 0.02 Da with a QTOF/HCD fragmentation type. Post-translational modifications considered within the search parameters included Carbamidomethylation (Cys; +57.021464 Da), Deamidation (Asn, Gln; +0.984016 Da), Gln->pyro-Glu (N-terminal Gln; −17.026549 Da), Oxidation (Met; +15.994915) and Acetylation (Protein N-terminal; +42.010565 Da). All modifications were considered variable, except for carbamidomethylation of Cys which was set as a fixed modification. Glycopeptides were identified in the samples following a separate, more focused search using the 20 fungal N-glycans and 14 fungal O-glycans databases. Data were filtered at 1% protein false discovery rate (FDR or 20% reverse count). The Byonic result files were imported into Byologic for further detailed analysis for result reporting. Following peptide mapping, peak areas of matched peptides were used to calculate the proportion of glycosylated to unglycosylated Ser (S) or Thr (T) residues in the peptide sequence. For each detected S/T, its individual glycosylation % was calculated as: (sum of XIC area of glycosylated peptide/(sum of XIC areas of glycosylated+unmodified peptide). The overall average % glycosylation for the sample was then calculated by averaging the individual S/T glycosylation % of all the detected (non-zero) Ser/Thr modifications.

### Example 11: Stimulation of Collagen I and Collagen III Synthesis by Truncated Human Collagen III Variants in Fibroblast Cells

[0435] A fibroblast cell culture model was used to assess the ability of the human collagen III variants having the amino acid sequences set forth in SEQ ID NOs: 987-1015 (the “second group of test materials”) to exert an effect on collagen synthesis. This study also assessed the viability of the cells after exposure to the second group of test materials.

### Summary of the Test Method

[0436] Fibroblasts are the main source of the extracellular matrix peptides, including the structural proteins type I collagen and type III collagen. In this study human dermal fibroblasts were treated with the second group of test materials for 48 hours, after which changes in the extracellular matrix (ECM) components were measured in the cell culture media using ELISA based methods.

### MTT Assay

[0437] In addition to the changes in ECM component production, the impact of the second group of test materials on cell viability was assessed using an MTT assay. The MTT assay on the second group of test materials was conducted as described for the test materials discussed in Example 6.

[0438] The samples were separated into batches 1-3 for testing. Batches 1-3, included each of the truncated human collagen III variants having the amino acid sequences set forth in SEQ ID NOs: 987-1015, provided herein. The relationship between the variant (identified by “variant letter”), their amino acid sequences, their nucleic acid sequence, the plasmid sequence used to prepare the Pichia strain for collagen expression, and identity to SEQ ID NO: 986 is provided below in Table 6.

TABLE 6

| | | | | % Protein |
|---|---|---|---|---|
| Variant | AA SEQ | Nucleic Acid | Plasmid SEQ | Sequence |
| Number | ID NO. | SEQ ID NO: | ID NO: | similarity |
| A | 987 | 1016 | 1045 | 100% |
| B | 988 | 1017 | 1046 | 92% |
| C | 989 | 1018 | 1047 | 90% |
| D | 990 | 1019 | 1048 | 98% |
| E | 991 | 1020 | 1049 | 90% |
| F | 992 | 1021 | 1050 | 96% |
| G | 993 | 1022 | 1051 | 90% |
| H | 994 | 1023 | 1052 | 100% |
| I | 995 | 1024 | 1053 | 77% |
| J | 996 | 1025 | 1054 | 77% |
| K | 997 | 1026 | 1055 | 68% |
| L | 998 | 1027 | 1056 | 99% |
| M | 999 | 1028 | 1057 | 92% |
| N | 1000 | 1029 | 1058 | 94% |
| O | 1001 | 1030 | 1059 | 90% |
| P | 1002 | 1031 | 1060 | 99% |
| Q | 1003 | 1032 | 1061 | 93% |
| R | 1004 | 1033 | 1062 | 90% |
| S | 1005 | 1034 | 1063 | 99% |
| T | 1006 | 1035 | 1064 | 96% |
| U | 1007 | 1036 | 1065 | 91% |
| V | 1008 | 1037 | 1066 | 90% |
| W | 1009 | 1038 | 1067 | 100% |
| X | 1010 | 1039 | 1068 | 98% |
| Y | 1011 | 1040 | 1069 | 98% |
| Z | 1012 | 1041 | 1070 | 96% |
| AA | 1013 | 1042 | 1071 | 90% |
| BB | 1014 | 1043 | 1072 | 91% |
| CC | 1015 | 1044 | 1073 | 99% |

[0439] The variants in Batch 1 of the second group of test materials (“Batch 1 test materials”) include Variants H, O, G, Q, R, V, T, P, and Z. The Batch 1 test materials were prepared as actives dissolved in a solution. Each variant collagen sample was diluted at a range of percent concentrations in the tissue culture media, FGM with 1.5% FBS (see FIGS. 17A-FIG. 17B). The concentrations reported in the results represent the final concentration of the solution in the tissue culture media (v/v).

[0440] Variant H (SEQ ID NO: 994) was tested at 5%, 1%, 0.5%, 0.01%, and 0.005% of the original concentration, which corresponded to actual tested concentrations of 0.068%, 0.014%, 0.007%, 0.000%, and 0.000%, respectively.

[0441] Variants O (SEQ ID NO: 1001), R(SEQ ID NO: 1004), and P (SEQ ID NO: 1002), were tested at 20%, 10%, 5%, 1% and 0.01% of the original concentration, which corresponded to actual tested concentrations of 0.127%, 0.063%, 0.032%, 0.006%, and 0.000% (Variant O); 0.103%, 0.052%, 0.026%, 0.005%, and 0.000% (Variant R); and 0.081%, 0.041%, 0.020%, 0.004%, and 0.000% (Variant P).

[0442] Variants G (SEQ ID NO: 993), Q (SEQ ID NO: 1003), V (SEQ ID NO: 1008), T (SEQ ID NO: 1006), and Z (SEQ ID NO: 1012) were tested at 50%, 25%, 10%, 1%, and 0.01% of the original concentration, which corresponded to actual tested concentrations of 0.614%, 0.307%, 0.123%, 0.012%, and 0.000% (Variant G); 0.369%, 0.185%, 0.074%, 0.007%, and 0.000% (Variant Q); 0.307%, 0.153%, 0.061%, 0.006%, and 0.000% (Variant V); 0.019%, 0.009%, 0.004%, 0.000% (Variant 23); and 0.767%, 0.383%, 0.153%, 0.015%, and 0.000% (Variant Z).

[0443] The variants in Batch 2 of the second group of test materials (“Batch 2 test materials”) include Variants A, L, N, B, D, S, U, C, W, Z, AA, E, and F. The Batch 2 test materials were prepared as actives dissolved in a solution. Each variant collagen sample was diluted at a range of percent concentrations in the tissue culture media, FGM with 1.5% FBS (see FIGS. 17C-FIG. 17F). The concentrations reported in the results represent the final concentration of the solution in the tissue culture media (v/v).

[0444] Variants A (SEQ ID NO: 987), B (SEQ ID NO: 988), D (SEQ ID NO: 990), C (SEQ ID NO: 989), and E (SEQ ID NO: 991) were tested at 5%, 1%, 0.5%, 0.01% and 0.005% of the original concentration, which corresponded to actual tested concentrations of 0.040%, 0.008%, 0.004%, and 0.000% (Variant A); 0.043%, 0.009%, 0.004%, and 0.000% (Variant B); 0.025%, 0.005%, 0.0025%, 0.00005%, and 0.000025% (Variant B); 0.0.109%, 0.022%, 0.011%, 0.000% (Variant C); and 0.060%, 0.012%, 0.006%, 0.000% (Variant E).

[0445] Variant L (SEQ ID NO: 998) and Variant Z (SEQ ID NO: 1012) were tested at 50%, 25%, 10%, 1%, and 0.01% % of the original concentration, which corresponded to actual tested concentrations of 0.563%, 0.281%, 0.113%, 0.011%, and 0.000% (Variant L); and 0.767%, 0.383%, 0.153%, 0.015%, and 0.000% (Variant Z).

[0446] Variants N (SEQ ID NO: 1000), S (SEQ ID NO: 1005), U (SEQ ID NO: 1007) and F (SEQ ID NO: 992) were tested at 20%, 10%, 5%, 1%, 0.01% of the original concentration, which corresponded to actual tested concentrations of 0.125%, 0.063%, 0.031%, 0.006%, and 0.000% respectively (Variant N); 0.146%, 0.073%, 0.036%, 0.007%, and 0.000% respectively (Variant S); 0.026%, 0.013%, 0.006%, 0.001%, and 0.000% respectively (Variant U); and 0.155%, 0.078%, 0.039%, 0.008%, and 0.000% respectively (Variant F).

[0447] Variants W (SEQ ID NO: 1009) and AA (SEQ ID NO: 1013) were tested at 25%, 10%, 5%, 1%, and 0.01% % of the original concentration, which corresponded to actual tested concentrations of 0.126%, 0.051%, 0.025%, 0.005%, and 0.000% respectively (Variant W); 0.608%, 0.243%, 0.122%, 0.024%, and 0.000% respectively (Variant AA).

[0448] The variants in Batch 3 of the second group of test materials (“Batch 3 test materials”) include Variants I, J, K, M, X, Y, BB, and CC. The Batch 3 test materials were prepared as actives dissolved in a solution. Each variant collagen sample was diluted at a range of percent concentrations in the tissue culture media, FGM with 1.5% FBS (see FIGS. 17G-FIG. 17H). The concentrations reported in the results represent the final concentration of the solution in the tissue culture media (v/v).

[0449] Variants J (SEQ ID NO: 996), M (SEQ ID NO: 999), Y (SEQ ID NO: 1011), and I (SEQ ID NO: 995) were tested at 30%, 20%, 10%, 1%, and 0.01% of the original concentration, which corresponded to actual tested concentrations of 0.193%, 0.129%, 0.064%, 0.006%, and 0.000% respectively (Variant J); 0.180%, 0.120%, 0.060%, 0.006%, 0.000% respectively (Variant M); 0.080%, 0.053%, 0.027%, 0.003%, and 0.000% respectively (Variant Y); and 0.204%, 0.136%, 0.068%, 0.007%, and 0.000% respectively (Variant I).

[0450] Variant X (SEQ ID NO: 1010) was tested at 50%, 25%, 10%, 1%, and 0.01% of the original concentration, which corresponded to actual tested concentrations of 0.103%, 0.0510%, 0.021%, 0.002%, and 0.000%.

[0451] Variants BB (SEQ ID NO: 1014) and CC (SEQ ID NO: 1015) were tested at 25%, 10%, 5%, 1%, 0.01% of the original concentration, which corresponded to actual tested concentrations of 0.414%, 0.165%, 0.083%, 0.017%, and 0.000% respectively (Variant 41); and 0.471%, 0.188%, 0.094%, 0.019%, and 0.000% respectively (Variant 42).

[0452] Variant K (SEQ ID NO: 1009) was tested at 20%, 10%, 5%, 1%, and 0.01% of the original concentration, which corresponded to actual tested concentrations of 0.270%, 0.135%, 0.068%, 0.014%, and 0.000%, respectively.

[0453] The results of the MTT assay are shown in FIGS. 17A-H, and the results are summarized below in Tables 7A-7C. In the tables, “Increase” indicates that the treatment significantly increased the end point, while “Decrease” indicates that the treatment significantly decreased the end point.

### Type I Collagen Assay

[0454] Fibroblasts are the main source of the extracellular matrix peptides, including collagen. Procollagen is a large peptide synthesized by fibroblasts in the dermal layer of the skin and is the precursor for collagen. As procollagen is processed to form a mature collagen protein, a propeptide portion is cleaved off in the form of a type I C-peptide. Both the mature collagen protein and the type I C-peptide fragment are then released into the extracellular environment. As collagen is synthesized the type I C-peptide fragment accumulates in the tissue culture medium. Since there is a 1:1 stoichiometric ratio between the two parts of the procollagen peptide, assaying for type I C-peptide reflects the amount of collagen synthesized. To measure the effects of different forms of collagen on collagen synthesis and secretion, Type 1 C-peptide was assayed via an ELISA based method. The Type I Collagen assay on the second group of test materials was conducted as described for the test materials discussed in Example 6.

[0455] The samples were separated into batches 1-3 for testing as described above. Batches 1-3, included each of the truncated human collagen III variants having the amino acid sequences set forth in SEQ ID NOs: 987-1015, provided herein. The relationship between the variant (identified by “variant letter”), their amino acid sequences, and their identity to SEQ ID NO: 986 is provided above in Table 6.

[0456] The variants in each batch of the second group of test materials were tested at the concentrations described in the MTT assay section above.

[0457] The results of the Type I Collagen assay are shown in FIGS. 18A-H, and the results are summarized below in Tables 7A-7C. In the tables, “Increase” indicates that the treatment significantly increased the end point, while “Decrease” indicates that the treatment significantly decreased the end point.

### Type III Collagen Assay

[0458] Type III collagen is synthesized by dermal fibroblasts as a large pro-peptide. As the peptide is processed to form a mature type III collagen protein, a pro-peptide portion is cleaved off (type III N-peptide). Both the mature collagen protein and the type III N-peptide fragment are then released into the extracellular environment. As collagen is synthesized the type III N-peptide fragment accumulates in the tissue culture medium. Since there is a 1:1 stoichiometric ratio between the two parts of the procollagen peptide, assaying for type III N-peptide reflects the amount of collagen synthesized. To measure the effects of different forms of collagen on collagen synthesis and secretion, Type III N-peptide was assayed via an ELISA based method. The Type III Collagen assay on the second group of test materials was conducted as described in Example 6.

[0459] The samples were separated into batches 1-3 for testing as described above. Batches 1-3, included each of the truncated human collagen III variants having the amino acid sequences set forth in SEQ ID NOs: 987-1015, provided herein. The relationship between the variant (identified by “variant number”), their amino acid sequences, and their identity to SEQ ID NO: 986 is provided above in Table 6.

[0460] The variants in each batch of the second group of test materials were tested at the concentrations described in the MTT assay section above. Each variant collagen sample was diluted at a range of percent concentrations in the tissue culture media, FGM with 1.5% FBS (see FIGS. 19A-FIG. 19B). The concentrations reported in the results represent the final concentration of the solution in the tissue culture media (v/v).

[0461] The results of the Collagen III assay are shown in FIGS. 19A-19H, and the results are summarized below in Tables 7A-7C. In the tables, “Increase” indicates that the treatment significantly increased the end point, while “Decrease” indicates that the treatment significantly decreased the end point.

### Tables 7A-7C Summary of Effects—Batches 1-3

TABLE 7A

| Treatment | MTT | Type I Col | Type III Col |
|---|---|---|---|
| 5% Variant H | Increase | — | Increase |
| 1% Variant H | — | — | Increase |
| 0.5% Variant H | — | — | |
| 0.01% Variant H | — | — | — |
| 0.005% Variant H | — | — | — |
| 20% Variant O | Decrease | Decrease | — |
| 10% Variant O | — | Decrease | Increase |
| 5% Variant O | — | — | Increase |
| 1% Variant O | — | — | — |
| 0.01% Variant O | — | — | — |
| 50% Variant G | Decrease | Decrease | — |
| 25% Variant G | Increase | — | Increase |
| 10% Variant G | Increase | Increase | Increase |
| 1% Variant G | Increase | Increase | — |
| 0.01% Variant G | Increase | — | — |
| 50% Variant Q | Increase | — | Increase |
| 25% Variant Q | Increase | Increase | Increase |
| 10% Variant Q | Increase | Increase | Increase |
| 1% Variant Q | Increase | Increase | Increase |
| 0.01% Variant Q | — | — | — |
| 20% Variant R | Decrease | Decrease | — |
| 10% Variant R | Increase | Decrease | Increase |
| 5% Variant R | — | — | Increase |
| 1% Variant R | — | — | — |
| 0.01% Variant R | — | — | — |
| 50% Variant V | — | Decrease | Increase |
| 25% Variant V | Increase | — | Increase |
| 10% Variant V | Increase | — | Increase |
| 1% Variant V | Increase | — | Increase |
| 0.01% Variant V | — | — | |
| 50% Variant T | Increase | Decrease | Increase |
| 25% Variant T | Increase | — | Increase |
| 10% Variant T | Increase | — | Increase |
| 1% Variant T | Increase | — | Increase |
| 0.01% Variant T | — | — | — |
| 20% Variant P | Decease | Decrease | Decrease |
| 10% Variant P | Increase | Decrease | Increase |
| 5% Variant P | Increase | — | Increase |
| 1% Variant P | Increase | — | Increase |
| 0.01% Variant P | — | — | |
| 50% Variant Z | — | — | Increase |
| 25% Variant Z | Increase | — | Increase |
| 10% Variant Z | Increase | — | Increase |
| 1% Variant Z | Increase | — | — |
| 0.01% Variant Z | — | Decrease | — |
| 5% Variant A | — | — | — |
| 1% Variant A | — | — | — |
| 0.5% Variant A | — | — | — |
| 0.01% Variant A | — | — | — |
| 0.005% Variant A | — | — | — |

TABLE 7B

| Treatment | MTT | Type I Col | Type III Col |
|---|---|---|---|
| 50% Variant L | — | Decrease | Decrease |
| 25% Variant L | Increase | Increase | Increase |
| 10% Variant L | Increase | Increase | — |
| 1% Variant L | — | — | — |
| 0.01% Variant L | — | — | — |
| 20% Variant N | Increase | — | — |
| 10% Variant N | Increase | Increase | Increase |
| 5% Variant N | Increase | Increase | — |
| 1% Variant N | Increase | — | — |
| 0.01% Variant N | — | — | — |
| 5% Variant B | Increase | — | — |
| 1% Variant B | Increase | — | — |
| 0.5% Variant B | — | — | — |
| 0.01% Variant B | — | — | — |
| 0.005% Variant B | — | — | — |
| 5% Variant D | — | — | — |
| 1% Variant D | — | Increase | — |
| 0.5% Variant D | — | — | — |
| 0.01% Variant D | — | — | — |
| 0.005% Variant D | — | — | — |
| 20% Variant S | Increase | Decrease | — |
| 10% Variant S | Increase | — | — |
| 5% Variant S | — | — | — |
| 1% Variant S | — | — | — |
| 0.01% Variant S | — | — | Increase |
| 20% Variant U | — | Decrease | Decrease |
| 10% Variant U | Increase | — | Increase |
| 5% Variant U | Increase | Increase | — |
| 1% Variant U | Increase | Increase | — |
| 0.01% Variant U | — | — | — |
| 5% Variant C | Increase | Increase | — |
| 1% Variant C | Increase | Increase | — |
| 0.5% Variant C | Increase | Increase | — |
| 0.01% Variant C | — | — | — |
| 0.005% Variant C | — | — | — |
| 25% Variant W | — | — | Increase |
| 10% Variant W | Increase | Increase | — |
| 5% Variant W | Increase | — | — |
| 1% Variant W | Increase | — | — |
| 0.01% Variant W | — | — | — |
| 50% Variant Z | Decrease | — | Decrease |
| 25% Variant Z | — | — | — |
| 10% Variant Z | Increase | Increase | — |
| 1% Variant Z | Increase | — | — |
| 0.01% Variant Z | — | — | — |
| 25% Variant AA | — | — | — |
| 10% Variant AA | Increase | Increase | Increase |
| 5% Variant AA | Increase | Increase | — |
| 1% Variant AA | Increase | — | — |
| 0.01% Variant AA | — | — | Decrease |

TABLE 7C

| Treatment | MTT | Type I Col | Type III Col |
|---|---|---|---|
| 5% Variant E | Increase | — | — |
| 1% Variant E | Increase | — | — |
| 0.5% Variant E | — | — | — |
| 0.01% Variant E | — | — | — |
| 0.005% Variant E | — | — | — |
| 20% Variant F | Decrease | Decrease | Decrease |
| 10% Variant F | Increase | — | — |
| 5% Variant F | — | — | — |
| 1% Variant F | — | — | — |
| 0.01% Variant F | — | — | — |
| 30% Variant J | Increase | Increase | Increase |
| 20% Variant J | Increase | Increase | Increase |
| 10% Variant J | Increase | Increase | Increase |
| 1% Variant J | Increase | — | — |
| 0.01% Variant J | — | — | — |
| 50% Variant X | Increase | — | Increase |
| 25% Variant X | Increase | — | Increase |
| 10% Variant X | Increase | — | — |
| 1% Variant X | — | — | — |
| 0.01% Variant X | — | — | — |
| 30% Variant M | — | — | Increase |
| 20% Variant M | — | — | Increase |
| 10% Variant M | Increase | — | Increase |
| 1% Variant M | Increase | — | Increase |
| 0.01% Variant M | — | — | — |
| 30% Variant Y | Increase | — | Increase |
| 20% Variant Y | Increase | — | Increase |
| 10% Variant Y | Increase | — | — |
| 1% Variant Y | Increase | — | — |
| 0.01% Variant Y | — | — | — |
| 30% Variant I | — | — | Increase |
| 20% Variant I | Increase | — | Increase |
| 10% Variant I | Increase | — | Increase |
| 1% Variant I | Increase | — | — |
| 0.01% Variant I | — | — | — |
| 25% Variant BB | — | — | Increase |
| 10% Variant BB | Increase | — | Increase |
| 5% Variant BB | Increase | — | Increase |
| 1% Variant BB | Increase | — | — |
| 0.01% Variant BB | — | — | — |
| 25% Variant CC | — | — | Increase |
| 10% Variant CC | Increase | — | Increase |
| 5% Variant CC | Increase | — | Increase |
| 1% Variant CC | Increase | — | — |
| 0.01% Variant CC | — | — | — |
| 20% Variant K | — | Decrease | — |
| 10% Variant K | Increase | — | Increase |
| 5% Variant K | Increase | — | Increase |
| 1% Variant K | Increase | — | Increase |
| 0.01% Variant K | — | — | — |

[0462] The results of the MTT assay demonstrate that, at certain concentrations, Variants B, C, E, F, G, H, I, J, K, L, M, N, P, Q, R, S, T, U, V, W, X, Y, Z, AA, BB, and CC were at least as viable as untreated control cells or increased cell viability.

[0463] The results of the Collagen I assay demonstrate that, at certain concentrations, Variants C, D, G, J, L, N, Q, U, W, Z, and AA increase increased the amount of Type I collagen secreted by the treated fibroblasts. These data indicate that compositions comprising these recombinant collagen variants are useful when increased production of type I collagen is desired.

[0464] The results of the Collagen III assay demonstrate that, at certain concentrations, Variants G, H, L, N, O, P, Q, R, S, T, U, V, W, Z, AA increased the amount of Type III collagen secreted by the treated fibroblasts. These data indicate that compositions comprising these recombinant collagen variants are useful when increased production of type III collagen is desired.

[0465] The collagen variants described in this example were produced and purified by the same procedures. However, impurity levels can vary from sample to sample which led to different toxicity level results in the MTT assay. In general, lower titer is associated with higher impurity levels. As a consequence, some variants with low titers could not be tested at relatively high concentrations for collagen stimulation evaluation.

[0466] The breadth and scope of the present disclosure should not be limited by any of the above-described exemplary embodiments, but should be defined only in accordance with the following claims and their equivalents.

1. A recombinant collagen fragment having a molecular weight of about 50 kDa and a sequence identity of at least about 85% to the amino acid sequence set forth in SEQ ID NO: 986.

2. The recombinant collagen fragment of claim 1, wherein the recombinant collagen fragment is unhydroxylated.

3. The recombinant collagen fragment of claim 1, wherein the recombinant collagen fragment is hydroxylated.

4. The recombinant collagen fragment of claim 1, wherein the collagen fragment has the amino acid sequence set forth in SEQ ID NO: 986.

5. A sequence variant of the recombinant collagen fragment of claim 1, wherein the sequence variant comprises the amino acid sequence set forth in any one of SEQ ID NOs: 988-1015.

6-7. (canceled)

8. A composition comprising the recombinant collagen fragment of claim 1.

9. (canceled)

10. The composition of claim 8, wherein the composition further comprises one or more peptides formed from the hydrolyzation of the collagen fragment having the amino acid sequence set forth in SEQ ID NO: 986.

11. (canceled)

12. The composition of claim 8, further comprising a pharmaceutically acceptable or cosmetically acceptable excipient.

13. A method of producing the recombinant collagen fragment of claim 1, comprising producing the recombinant collagen fragment in a genetically engineered strain of yeast.

14. The method of claim 13, wherein the yeast is Pichia pastoris.

15-16. (canceled)

17. The method of claim 13, wherein the method comprises:
(i) fermenting a genetically engineered yeast in a fermentation broth;
(ii) recovering from the fermentation broth recombinant collagen fragments secreted by the genetically engineered yeast; and
(iii) purifying the recombinant collagen fragments.

18. The method of claim 17, further comprising hydroxylating the recombinant collagen fragment ex vivo.

19. A method of producing the sequence variant of claim 5, comprising producing the recombinant collagen fragment in a genetically engineered strain of yeast.

20-23. (canceled)

24. A strain of yeast genetically engineered to produce the recombinant collagen fragment of claim 1, wherein the strain of yeast comprises a vector comprising a DNA sequence encoding the recombinant collagen.

25. A strain of yeast genetically engineered to produce the sequence variant of claim 5, wherein the strain of yeast comprises a vector comprising a DNA sequence encoding the variant.

26. The strain of yeast of claim 24, wherein the vector comprises a nucleic acid sequence comprising the DNA sequence set forth in SEQ ID NO: 973.

27. The strain of yeast of claim 26, further comprising a second vector comprising a nucleic acid sequence comprising the DNA sequence set forth in SEQ ID NO: 974.

28. (canceled)

29. The strain of yeast of claim 24, wherein the strain of yeast is Pichia pastoris.

30. (canceled)

31. A method of treating a dermatological condition comprising topically administering an effective amount of the composition of claim 8 to an area of skin on a subject in need thereof, wherein the dermatological condition comprises fine lines, wrinkles, dry skin, excessive pore size, skin dyschromia, reduced elasticity, unwanted hair, skin thinning, purpura, actinic keratosis, pruritus, eczema, acne, rosacea, erythema, telangiectasia, actinic telangiectasia, skin cancer, or rhinophyma.

32-34. (canceled)

35. A method of increasing collagen production in cells, comprising administering an effective amount of the recombinant collagen fragment of claim 1 to the cells, wherein the method increases the production of Type I collagen, Type III collagen, or a combination thereof.

36-40. (canceled)

41. The method of claim 35, wherein the fragment has an amino acid sequence set forth in SEQ ID NO: 986.

42-43. (canceled)

44. A method of treating a wound in a human subject in need thereof, the method comprising applying the composition of claim 8 to the wound on the subject, wherein applying the recombinant collagen fragment induces the production of human Type I collagen, human Type III collagen, or a combination thereof.

45-79. (canceled)

The application's sequence listing, which the Patent Office published only in electronic form, follows.

SEQUENCE LISTING (1073 sequences)

SEQ ID NO: 1 - protein, 528 aa, Artificial Sequence
  50 kDa human collagen fragment
DVKSGVAVGGLAGYPGPAGPPGPPGPPGTSGHPGSPGSPGYQGPPGEPGQAGPSGPPGPPGAIGPSGPAGKDGESGRPGRPGERGLPGPPGIKGPAGIPGFPGMKGHRGFDGRNGEKGETGAPGLKGENGLPGENGAPGPMGPRGAPGERGRPGLPGAAGARGNDGARGSDGQPGPPGPPGTAGFPGSPGAKGEVGPAGSPGSNGAPGQRGEPGPQGHAGAQGPPGPPGINGSPGGKGEMGPAGIPGAPGLMGARGPPGPAGANGAPGLRGGAGEPGKNGAKGEPGPRGERGEAGIPGVPGAKGEDGKDGSPGEPGANGLPGAAGERGAPGFRGPAGPNGIPGEKGPAGERGAPGPAGPRGAAGEPGRDGVPGGPGMRGMPGSPGGPGSDGKPGPPGSQGESGRPGPPGPSGPRGQPGVMGFPGPKGNDGAPGKNGERGGPGGPGPQGPPGKNGETGPQGPPGPTGPGGDKGDTGPPGPQGLQGLPGTGGPPGENGKPGEPGPKGDAGAPGAPGGKGDAGAPGERGPP

SEQ ID NO: 2 - protein, 26 aa, Artificial Sequence
  Synthetic sequence
AAGARGNDGARGSDGQPGPPGPPGTA

SEQ ID NO: 3 - protein, 35 aa, Artificial Sequence
  Synthetic sequence
AAGARGNDGARGSDGQPGPPGPPGTAGFPGSPGAK

SEQ ID NO: 4 - protein, 41 aa, Artificial Sequence
  Synthetic sequence
AAGARGNDGARGSDGQPGPPGPPGTAGFPGSPGAKGEVGPA

SEQ ID NO: 5 - protein, 21 aa, Artificial Sequence
  Synthetic sequence
AAGEPGRDGVPGGPGMRGMPG

SEQ ID NO: 6 - protein, 27 aa, Artificial Sequence
  Synthetic sequence
AAGEPGRDGVPGGPGMRGMPGSPGGPG

SEQ ID NO: 7 - protein, 17 aa, Artificial Sequence
  Synthetic sequence
AAGERGAPGFRGPAGPN

SEQ ID NO: 8 - protein, 13 aa, Artificial Sequence
  Synthetic sequence
AGAQGPPGPPGIN

SEQ ID NO: 9 - protein, 34 aa, Artificial Sequence
  Synthetic sequence
AGAQGPPGPPGINGSPGGKGEMGPAGIPGAPGLM

SEQ ID NO: 10 - protein, 25 aa, Artificial Sequence
  Synthetic sequence
AGARGNDGARGSDGQPGPPGPPGTA

SEQ ID NO: 11 - protein, 40 aa, Artificial Sequence
  Synthetic sequence
AGARGNDGARGSDGQPGPPGPPGTAGFPGSPGAKGEVGPA

SEQ ID NO: 12 - protein, 26 aa, Artificial Sequence
  Synthetic sequence
AGEPGRDGVPGGPGMRGMPGSPGGPG

SEQ ID NO: 13 - protein, 16 aa, Artificial Sequence
  Synthetic sequence
AGERGAPGFRGPAGPN

SEQ ID NO: 14 - protein, 10 aa, Artificial Sequence
  Synthetic sequence
AGIPGAPGLM

SEQ ID NO: 15 - protein, 28 aa, Artificial Sequence
  Synthetic sequence
AGIPGAPGLMGARGPPGPAGANGAPGLR

SEQ ID NO: 16 - protein, 12 aa, Artificial Sequence
  Synthetic sequence
AGIPGFPGMKGH

SEQ ID NO: 17 - protein, 14 aa, Artificial Sequence
  Synthetic sequence
AGIPGFPGMKGHRG

SEQ ID NO: 18 - protein, 15 aa, Artificial Sequence
  Synthetic sequence
AGIPGFPGMKGHRGF

SEQ ID NO: 19 - protein, 19 aa, Artificial Sequence
  Synthetic sequence
AGIPGFPGMKGHRGFDGRN

SEQ ID NO: 20 - protein, 31 aa, Artificial Sequence
  Synthetic sequence
AGIPGFPGMKGHRGFDGRNGEKGETGAPGLK

SEQ ID NO: 21 - protein, 34 aa, Artificial Sequence
  Synthetic sequence
AGIPGFPGMKGHRGFDGRNGEKGETGAPGLKGEN

SEQ ID NO: 22 - protein, 25 aa, Artificial Sequence
  Synthetic sequence
AGKDGESGRPGRPGERGLPGPPGIK

SEQ ID NO: 23 - protein, 28 aa, Artificial Sequence
  Synthetic sequence
AGKDGESGRPGRPGERGLPGPPGIKGPA

SEQ ID NO: 24 - protein, 13 aa, Artificial Sequence
  Synthetic sequence
AGPPGPPGPPGTS

SEQ ID NO: 25 - protein, 15 aa, Artificial Sequence
  Synthetic sequence
AGPPGPPGPPGTSGH

SEQ ID NO: 26 - protein, 16 aa, Artificial Sequence
  Synthetic sequence
AGPSGPPGPPGAIGPS

SEQ ID NO: 27 - protein, 43 aa, Artificial Sequence
  Synthetic sequence
AGPSGPPGPPGAIGPSGPAGKDGESGRPGRPGERGLPGPPGIK

SEQ ID NO: 28 - protein, 55 aa, Artificial Sequence
  Synthetic sequence
AGSPGSNGAPGQRGEPGPQGHAGAQGPPGPPGINGSPGGKGEMGPAGIPGAPGLM

SEQ ID NO: 29 - protein, 19 aa, Artificial Sequence
  Synthetic sequence
AGYPGPAGPPGPPGPPGTS

SEQ ID NO: 30 - protein, 55 aa, Artificial Sequence
  Synthetic sequence
AGYPGPAGPPGPPGPPGTSGHPGSPGSPGYQGPPGEPGQAGPSGPPGPPGAIGPS

SEQ ID NO: 31 - protein, 32 aa, Artificial Sequence
  Synthetic sequence
AIGPSGPAGKDGESGRPGRPGERGLPGPPGIK

SEQ ID NO: 32 - protein, 27 aa, Artificial Sequence
  Synthetic sequence
AKGEVGPAGSPGSNGAPGQRGEPGPQG

SEQ ID NO: 33 - protein, 41 aa, Artificial Sequence
  Synthetic sequence
AKGEVGPAGSPGSNGAPGQRGEPGPQGHAGAQGPPGPPGIN

SEQ ID NO: 34 - protein, 26 aa, Artificial Sequence
  Synthetic sequence
ANGAPGLRGGAGEPGKNGAKGEPGPR

SEQ ID NO: 35 - protein, 23 aa, Artificial Sequence
  Synthetic sequence
ANGLPGAAGERGAPGFRGPAGPN

SEQ ID NO: 36 - protein, 17 aa, Artificial Sequence
  Synthetic sequence
APGERGRPGLPGAAGAR

SEQ ID NO: 37 - protein, 38 aa, Artificial Sequence
  Synthetic sequence
APGERGRPGLPGAAGARGNDGARGSDGQPGPPGPPGTA

SEQ ID NO: 38 - protein, 14 aa, Artificial Sequence
  Synthetic sequence
APGLKGENGLPGEN

SEQ ID NO: 39 - protein, 23 aa, Artificial Sequence
  Synthetic sequence
APGLKGENGLPGENGAPGPMGPR

SEQ ID NO: 40 - protein, 14 aa, Artificial Sequence
  Synthetic sequence
APGLMGARGPPGPA

SEQ ID NO: 41 - protein, 17 aa, Artificial Sequence
  Synthetic sequence
APGLMGARGPPGPAGAN

SEQ ID NO: 42 - protein, 23 aa, Artificial Sequence
  Synthetic sequence
APGLMGARGPPGPAGANGAPGLR

SEQ ID NO: 43 - protein, 26 aa, Artificial Sequence
  Synthetic sequence
APGQRGEPGPQGHAGAQGPPGPPGIN

SEQ ID NO: 44 - protein, 11 aa, Artificial Sequence
  Synthetic sequence
AQGPPGPPGIN

SEQ ID NO: 45 - protein, 15 aa, Artificial Sequence
  Synthetic sequence
AQGPPGPPGINGSPG

SEQ ID NO: 46 - protein, 17 aa, Artificial Sequence
  Synthetic sequence
AQGPPGPPGINGSPGGK

SEQ ID NO: 47 - protein, 23 aa, Artificial Sequence
  Synthetic sequence
AQGPPGPPGINGSPGGKGEMGPA

SEQ ID NO: 48 - protein, 35 aa, Artificial Sequence
  Synthetic sequence
AQGPPGPPGINGSPGGKGEMGPAGIPGAPGLMGAR

SEQ ID NO: 49 - protein, 23 aa, Artificial Sequence
  Synthetic sequence
ARGNDGARGSDGQPGPPGPPGTA

SEQ ID NO: 50 - protein, 25 aa, Artificial Sequence
  Synthetic sequence
ARGNDGARGSDGQPGPPGPPGTAGF

SEQ ID NO: 51 - protein, 38 aa, Artificial Sequence
  Synthetic sequence
ARGNDGARGSDGQPGPPGPPGTAGFPGSPGAKGEVGPA

SEQ ID NO: 52 - protein, 44 aa, Artificial Sequence
  Synthetic sequence
ARGNDGARGSDGQPGPPGPPGTAGFPGSPGAKGEVGPAGSPGSN

SEQ ID NO: 53 - protein, 17 aa, Artificial Sequence
  Synthetic sequence
ARGPPGPAGANGAPGLR

SEQ ID NO: 54 - protein, 26 aa, Artificial Sequence
  Synthetic sequence
ARGPPGPAGANGAPGLRGGAGEPGKN

SEQ ID NO: 55 - protein, 17 aa, Artificial Sequence
  Synthetic sequence
ARGSDGQPGPPGPPGTA

SEQ ID NO: 56 - protein, 26 aa, Artificial Sequence
  Synthetic sequence
ARGSDGQPGPPGPPGTAGFPGSPGAK

SEQ ID NO: 57 - protein, 23 aa, Artificial Sequence
  Synthetic sequence
DAGAPGAPGGKGDAGAPGERGPP

SEQ ID NO: 58 - protein, 23 aa, Artificial Sequence
  Synthetic sequence
DGAPGKNGERGGPGGPGPQGPPG

SEQ ID NO: 59 - protein, 25 aa, Artificial Sequence
  Synthetic sequence
DGAPGKNGERGGPGGPGPQGPPGKN

SEQ ID NO: 60 - protein, 27 aa, Artificial Sequence
  Synthetic sequence
DGAPGKNGERGGPGGPGPQGPPGKNGE

SEQ ID NO: 61 - protein, 29 aa, Artificial Sequence
  Synthetic sequence
DGAPGKNGERGGPGGPGPQGPPGKNGETG

SEQ ID NO: 62 - protein, 30 aa, Artificial Sequence
  Synthetic sequence
DGAPGKNGERGGPGGPGPQGPPGKNGETGP

SEQ ID NO: 63 - protein, 31 aa, Artificial Sequence
  Synthetic sequence
DGAPGKNGERGGPGGPGPQGPPGKNGETGPQ

SEQ ID NO: 64 - protein, 32 aa, Artificial Sequence
  Synthetic sequence
DGAPGKNGERGGPGGPGPQGPPGKNGETGPQG

SEQ ID NO: 65 - protein, 35 aa, Artificial Sequence
  Synthetic sequence
DGAPGKNGERGGPGGPGPQGPPGKNGETGPQGPPG

SEQ ID NO: 66 - protein, 36 aa, Artificial Sequence
  Synthetic sequence
DGAPGKNGERGGPGGPGPQGPPGKNGETGPQGPPGP

SEQ ID NO: 67 - protein, 38 aa, Artificial Sequence
  Synthetic sequence
DGAPGKNGERGGPGGPGPQGPPGKNGETGPQGPPGPTG

SEQ ID NO: 68 - protein, 40 aa, Artificial Sequence
  Synthetic sequence
DGAPGKNGERGGPGGPGPQGPPGKNGETGPQGPPGPTGPG

SEQ ID NO: 69 - protein, 41 aa, Artificial Sequence
  Synthetic sequence
DGAPGKNGERGGPGGPGPQGPPGKNGETGPQGPPGPTGPGG

SEQ ID NO: 70 - protein, 17 aa, Artificial Sequence
  Synthetic sequence
DGARGSDGQPGPPGPPG

SEQ ID NO: 71 - protein, 19 aa, Artificial Sequence
  Synthetic sequence
DGARGSDGQPGPPGPPGTA

SEQ ID NO: 72 - protein, 20 aa, Artificial Sequence
  Synthetic sequence
DGARGSDGQPGPPGPPGTAG

SEQ ID NO: 73 - protein, 21 aa, Artificial Sequence
  Synthetic sequence
DGARGSDGQPGPPGPPGTAGF

SEQ ID NO: 74 - protein, 23 aa, Artificial Sequence
  Synthetic sequence
DGARGSDGQPGPPGPPGTAGFPG

SEQ ID NO: 75 - protein, 28 aa, Artificial Sequence
  Synthetic sequence
DGARGSDGQPGPPGPPGTAGFPGSPGAK

SEQ ID NO: 76 - protein, 29 aa, Artificial Sequence
  Synthetic sequence
DGARGSDGQPGPPGPPGTAGFPGSPGAKG

SEQ ID NO: 77 - protein, 34 aa, Artificial Sequence
  Synthetic sequence
DGARGSDGQPGPPGPPGTAGFPGSPGAKGEVGPA

SEQ ID NO: 78 - protein, 35 aa, Artificial Sequence
  Synthetic sequence
DGARGSDGQPGPPGPPGTAGFPGSPGAKGEVGPAG

SEQ ID NO: 79 - protein, 38 aa, Artificial Sequence
  Synthetic sequence
DGARGSDGQPGPPGPPGTAGFPGSPGAKGEVGPAGSPG

SEQ ID NO: 80 - protein, 40 aa, Artificial Sequence
  Synthetic sequence
DGARGSDGQPGPPGPPGTAGFPGSPGAKGEVGPAGSPGSN

SEQ ID NO: 81 - protein, 52 aa, Artificial Sequence
  Synthetic sequence
DGARGSDGQPGPPGPPGTAGFPGSPGAKGEVGPAGSPGSNGAPGQRGEPGPQ

SEQ ID NO: 82 - protein, 22 aa, Artificial Sequence
  Synthetic sequence
DGESGRPGRPGERGLPGPPGIK

SEQ ID NO: 83 - protein, 25 aa, Artificial Sequence
  Synthetic sequence
DGESGRPGRPGERGLPGPPGIKGPA

SEQ ID NO: 84 - protein, 31 aa, Artificial Sequence
  Synthetic sequence
DGKPGPPGSQGESGRPGPPGPSGPRGQPGVM

SEQ ID NO: 85 - protein, 13 aa, Artificial Sequence
  Synthetic sequence
DGQPGPPGPPGTA

SEQ ID NO: 86 - protein, 16 aa, Artificial Sequence
  Synthetic sequence
DGRNGEKGETGAPGLK

SEQ ID NO: 87 - protein, 25 aa, Artificial Sequence
  Synthetic sequence
DGRNGEKGETGAPGLKGENGLPGEN

SEQ ID NO: 88 - protein, 34 aa, Artificial Sequence
  Synthetic sequence
DGRNGEKGETGAPGLKGENGLPGENGAPGPMGPR

SEQ ID NO: 89 - protein, 49 aa, Artificial Sequence
  Synthetic sequence
DGRNGEKGETGAPGLKGENGLPGENGAPGPMGPRGAPGERGRPGLPGAA

SEQ ID NO: 90 - protein, 52 aa, Artificial Sequence
  Synthetic sequence
DGRNGEKGETGAPGLKGENGLPGENGAPGPMGPRGAPGERGRPGLPGAAGAR

SEQ ID NO: 91 - protein, 29 aa, Artificial Sequence
  Synthetic sequence
EKGETGAPGLKGENGLPGENGAPGPMGPR

SEQ ID NO: 92 - protein, 17 aa, Artificial Sequence
  Synthetic sequence
EMGPAGIPGAPGLMGAR

SEQ ID NO: 93 - protein, 17 aa, Artificial Sequence
  Synthetic sequence
ENGLPGENGAPGPMGPR

SEQ ID NO: 94 - protein, 35 aa, Artificial Sequence
  Synthetic sequence
ENGLPGENGAPGPMGPRGAPGERGRPGLPGAAGAR

SEQ ID NO: 95 - protein, 20 aa, Artificial Sequence
  Synthetic sequence
EPGQAGPSGPPGPPGAIGPS

SEQ ID NO: 96 - protein, 14 aa, Artificial Sequence
  Synthetic sequence
ERGLPGPPGIKGPA

SEQ ID NO: 97 - protein, 20 aa, Artificial Sequence
  Synthetic sequence
ESGRPGPPGPSGPRGQPGVM

SEQ ID NO: 98 - protein, 28 aa, Artificial Sequence
  Synthetic sequence
ESGRPGPPGPSGPRGQPGVMGFPGPKGN

SEQ ID NO: 99 - protein, 20 aa, Artificial Sequence
  Synthetic sequence
ESGRPGRPGERGLPGPPGIK

SEQ ID NO: 100 - protein, 17 aa, Artificial Sequence
  Synthetic sequence
ETGAPGLKGENGLPGEN

SEQ ID NO: 101 - protein, 26 aa, Artificial Sequence
  Synthetic sequence
ETGAPGLKGENGLPGENGAPGPMGPR

SEQ ID NO: 102 - protein, 16 aa, Artificial Sequence
  Synthetic sequence
ETGPQGPPGPTGPGGD

SEQ ID NO: 103 - protein, 23 aa, Artificial Sequence
  Synthetic sequence
EVGPAGSPGSNGAPGQRGEPGPQ

SEQ ID NO: 104 - protein, 25 aa, Artificial Sequence
  Synthetic sequence
EVGPAGSPGSNGAPGQRGEPGPQGH

SEQ ID NO: 105 - protein, 27 aa, Artificial Sequence
  Synthetic sequence
EVGPAGSPGSNGAPGQRGEPGPQGHAG

SEQ ID NO: 106 - protein, 29 aa, Artificial Sequence
  Synthetic sequence
EVGPAGSPGSNGAPGQRGEPGPQGHAGAQ

SEQ ID NO: 107 - protein, 38 aa, Artificial Sequence
  Synthetic sequence
EVGPAGSPGSNGAPGQRGEPGPQGHAGAQGPPGPPGIN

SEQ ID NO: 108 - protein, 44 aa, Artificial Sequence
  Synthetic sequence
EVGPAGSPGSNGAPGQRGEPGPQGHAGAQGPPGPPGINGSPGGK

SEQ ID NO: 109 - protein, 20 aa, Artificial Sequence
  Synthetic sequence
FDGRNGEKGETGAPGLKGEN

SEQ ID NO: 110 - protein, 26 aa, Artificial Sequence
  Synthetic sequence
FDGRNGEKGETGAPGLKGENGLPGEN

SEQ ID NO: 111 - protein, 35 aa, Artificial Sequence
  Synthetic sequence
FDGRNGEKGETGAPGLKGENGLPGENGAPGPMGPR

SEQ ID NO: 112 - protein, 14 aa, Artificial Sequence
  Synthetic sequence
FPGSPGAKGEVGPA

SEQ ID NO: 113 - protein, 20 aa, Artificial Sequence
  Synthetic sequence
FPGSPGAKGEVGPAGSPGSN

SEQ ID NO: 114 - protein, 24 aa, Artificial Sequence
  Synthetic sequence
GAAGARGNDGARGSDGQPGPPGPP

SEQ ID NO: 115 - protein, 27 aa, Artificial Sequence
  Synthetic sequence
GAAGARGNDGARGSDGQPGPPGPPGTA

SEQ ID NO: 116 - protein, 36 aa, Artificial Sequence
  Synthetic sequence
GAAGARGNDGARGSDGQPGPPGPPGTAGFPGSPGAK

SEQ ID NO: 117 - protein, 42 aa, Artificial Sequence
  Synthetic sequence
GAAGARGNDGARGSDGQPGPPGPPGTAGFPGSPGAKGEVGPA

SEQ ID NO: 118 - protein, 22 aa, Artificial Sequence
  Synthetic sequence
GAAGEPGRDGVPGGPGMRGMPG

SEQ ID NO: 119 - protein, 28 aa, Artificial Sequence
  Synthetic sequence
GAAGEPGRDGVPGGPGMRGMPGSPGGPG

SEQ ID NO: 120 - protein, 18 aa, Artificial Sequence
  Synthetic sequence
GAAGERGAPGFRGPAGPN

SEQ ID NO: 121 - protein, 24 aa, Artificial Sequence
  Synthetic sequence
GAIGPSGPAGKDGESGRPGRPGER

SEQ ID NO: 122 - protein, 30 aa, Artificial Sequence
  Synthetic sequence
GAIGPSGPAGKDGESGRPGRPGERGLPGPP

SEQ ID NO: 123 - protein, 33 aa, Artificial Sequence
  Synthetic sequence
GAIGPSGPAGKDGESGRPGRPGERGLPGPPGIK

SEQ ID NO: 124 - protein, 22 aa, Artificial Sequence
  Synthetic sequence
GAKGEPGPRGERGEAGIPGVPG

SEQ ID NO: 125 - protein, 24 aa, Artificial Sequence
  Synthetic sequence
GAKGEPGPRGERGEAGIPGVPGAK

SEQ ID NO: 126 - protein, 25 aa, Artificial Sequence
  Synthetic sequence
GAKGEPGPRGERGEAGIPGVPGAKG

SEQ ID NO: 127 - protein, 29 aa, Artificial Sequence
  Synthetic sequence
GAKGEPGPRGERGEAGIPGVPGAKGEDGK

SEQ ID NO: 128 - protein, 31 aa, Artificial Sequence
  Synthetic sequence
GAKGEPGPRGERGEAGIPGVPGAKGEDGKDG

SEQ ID NO: 129 - protein, 32 aa, Artificial Sequence
  Synthetic sequence
GAKGEPGPRGERGEAGIPGVPGAKGEDGKDGS

SEQ ID NO: 130 - protein, 39 aa, Artificial Sequence
  Synthetic sequence
GAKGEPGPRGERGEAGIPGVPGAKGEDGKDGSPGEPGAN

SEQ ID NO: 131 - protein, 27 aa, Artificial Sequence
  Synthetic sequence
GAKGEVGPAGSPGSNGAPGQRGEPGPQ

SEQ ID NO: 132 - protein, 28 aa, Artificial Sequence
  Synthetic sequence
GAKGEVGPAGSPGSNGAPGQRGEPGPQG

SEQ ID NO: 133 - protein, 29 aa, Artificial Sequence
  Synthetic sequence
GAKGEVGPAGSPGSNGAPGQRGEPGPQGH

SEQ ID NO: 134 - protein, 33 aa, Artificial Sequence
  Synthetic sequence
GAKGEVGPAGSPGSNGAPGQRGEPGPQGHAGAQ

SEQ ID NO: 135 - protein, 42 aa, Artificial Sequence
  Synthetic sequence
GAKGEVGPAGSPGSNGAPGQRGEPGPQGHAGAQGPPGPPGIN

SEQ ID NO: 136 - protein, 9 aa, Artificial Sequence
  Synthetic sequence
GANGAPGLR

SEQ ID NO: 137 - protein, 18 aa, Artificial Sequence
  Synthetic sequence
GANGAPGLRGGAGEPGKN

SEQ ID NO: 138 - protein, 21 aa, Artificial Sequence
  Synthetic sequence
GANGAPGLRGGAGEPGKNGAK

SEQ ID NO: 139 - protein, 27 aa, Artificial Sequence
  Synthetic sequence
GANGAPGLRGGAGEPGKNGAKGEPGPR

SEQ ID NO: 140 - protein, 28 aa, Artificial Sequence
  Synthetic sequence
GANGAPGLRGGAGEPGKNGAKGEPGPRG

SEQ ID NO: 141 - protein, 30 aa, Artificial Sequence
  Synthetic sequence
GANGAPGLRGGAGEPGKNGAKGEPGPRGER

SEQ ID NO: 142 - protein, 31 aa, Artificial Sequence
  Synthetic sequence
GANGAPGLRGGAGEPGKNGAKGEPGPRGERG

SEQ ID NO: 143 - protein, 34 aa, Artificial Sequence
  Synthetic sequence
GANGAPGLRGGAGEPGKNGAKGEPGPRGERGEAG

SEQ ID NO: 144 - protein, 15 aa, Artificial Sequence
  Synthetic sequence
GAPGERGRPGLPGAA

SEQ ID NO: 145 - protein, 16 aa, Artificial Sequence
  Synthetic sequence
GAPGERGRPGLPGAAG

SEQ ID NO: 146 - protein, 17 aa, Artificial Sequence
  Synthetic sequence
GAPGERGRPGLPGAAGA

SEQ ID NO: 147 - protein, 18 aa, Artificial Sequence
  Synthetic sequence
GAPGERGRPGLPGAAGAR

SEQ ID NO: 148 - protein, 20 aa, Artificial Sequence
  Synthetic sequence
GAPGERGRPGLPGAAGARGN

SEQ ID NO: 149 - protein, 21 aa, Artificial Sequence
  Synthetic sequence
GAPGERGRPGLPGAAGARGND

SEQ ID NO: 150 - protein, 22 aa, Artificial Sequence
  Synthetic sequence
GAPGERGRPGLPGAAGARGNDG

SEQ ID NO: 151 - protein, 23 aa, Artificial Sequence
  Synthetic sequence
GAPGERGRPGLPGAAGARGNDGA

SEQ ID NO: 152 - protein, 24 aa, Artificial Sequence
  Synthetic sequence
GAPGERGRPGLPGAAGARGNDGAR

SEQ ID NO: 153 - protein, 25 aa, Artificial Sequence
  Synthetic sequence
GAPGERGRPGLPGAAGARGNDGARG

SEQ ID NO: 154 - protein, 26 aa, Artificial Sequence
  Synthetic sequence
GAPGERGRPGLPGAAGARGNDGARGS

SEQ ID NO: 155 - protein, 27 aa, Artificial Sequence
  Synthetic sequence
GAPGERGRPGLPGAAGARGNDGARGSD

SEQ ID NO: 156 - protein, 28 aa, Artificial Sequence
  Synthetic sequence
GAPGERGRPGLPGAAGARGNDGARGSDG

SEQ ID NO: 157 - protein, 29 aa, Artificial Sequence
  Synthetic sequence
GAPGERGRPGLPGAAGARGNDGARGSDGQ

SEQ ID NO: 158 - protein, 31 aa, Artificial Sequence
  Synthetic sequence
GAPGERGRPGLPGAAGARGNDGARGSDGQPG

SEQ ID NO: 159 - protein, 32 aa, Artificial Sequence
  Synthetic sequence
GAPGERGRPGLPGAAGARGNDGARGSDGQPGP

SEQ ID NO: 160 - protein, 34 aa, Artificial Sequence
  Synthetic sequence
GAPGERGRPGLPGAAGARGNDGARGSDGQPGPPG

SEQ ID NO: 161 - protein, 35 aa, Artificial Sequence
  Synthetic sequence
GAPGERGRPGLPGAAGARGNDGARGSDGQPGPPGP

SEQ ID NO: 162 - protein, 37 aa, Artificial Sequence
  Synthetic sequence
GAPGERGRPGLPGAAGARGNDGARGSDGQPGPPGPPG

SEQ ID NO: 163 - protein, 39 aa, Artificial Sequence
  Synthetic sequence
GAPGERGRPGLPGAAGARGNDGARGSDGQPGPPGPPGTA

SEQ ID NO: 164 - protein, 48 aa, Artificial Sequence
  Synthetic sequence
GAPGERGRPGLPGAAGARGNDGARGSDGQPGPPGPPGTAGFPGSPGAK

SEQ ID NO: 165 - protein, 52 aa, Artificial Sequence
  Synthetic sequence
GAPGERGRPGLPGAAGARGNDGARGSDGQPGPPGPPGTAGFPGSPGAKGEVG

SEQ ID NO: 166 - protein, 54 aa, Artificial Sequence
  Synthetic sequence
GAPGERGRPGLPGAAGARGNDGARGSDGQPGPPGPPGTAGFPGSPGAKGEVGPA

SEQ ID NO: 167 - protein, 55 aa, Artificial Sequence
  Synthetic sequence
GAPGERGRPGLPGAAGARGNDGARGSDGQPGPPGPPGTAGFPGSPGAKGEVGPAG

SEQ ID NO: 168 - protein, 24 aa, Artificial Sequence
  Synthetic sequence
GAPGLKGENGLPGENGAPGPMGPR

SEQ ID NO: 169 - protein, 15 aa, Artificial Sequence
  Synthetic sequence
GAPGLMGARGPPGPA

SEQ ID NO: 170 - protein, 18 aa, Artificial Sequence
  Synthetic sequence
GAPGLMGARGPPGPAGAN

SEQ ID NO: 171 - protein, 21 aa, Artificial Sequence
  Synthetic sequence
GAPGLMGARGPPGPAGANGAP

SEQ ID NO: 172 - protein, 24 aa, Artificial Sequence
  Synthetic sequence
GAPGLMGARGPPGPAGANGAPGLR

SEQ ID NO: 173 - protein, 33 aa, Artificial Sequence
  Synthetic sequence
GAPGLMGARGPPGPAGANGAPGLRGGAGEPGKN

SEQ ID NO: 174 - protein, 30 aa, Artificial Sequence
  Synthetic sequence
GAPGLRGGAGEPGKNGAKGEPGPRGERGEA

SEQ ID NO: 175 - protein, 22 aa, Artificial Sequence
  Synthetic sequence
GAPGPAGPRGAAGEPGRDGVPG

SEQ ID NO: 176 - protein, 31 aa, Artificial Sequence
  Synthetic sequence
GAPGPAGPRGAAGEPGRDGVPGGPGMRGMPG

SEQ ID NO: 177 - protein, 21 aa, Artificial Sequence
  Synthetic sequence
GAPGPMGPRGAPGERGRPGLP

SEQ ID NO: 178 - protein, 22 aa, Artificial Sequence
  Synthetic sequence
GAPGPMGPRGAPGERGRPGLPG

SEQ ID NO: 179 - protein, 24 aa, Artificial Sequence
  Synthetic sequence
GAPGPMGPRGAPGERGRPGLPGAA

SEQ ID NO: 180 - protein, 25 aa, Artificial Sequence
  Synthetic sequence
GAPGPMGPRGAPGERGRPGLPGAAG

SEQ ID NO: 181 - protein, 26 aa, Artificial Sequence
  Synthetic sequence
GAPGPMGPRGAPGERGRPGLPGAAGA

SEQ ID NO: 182 - protein, 27 aa, Artificial Sequence
  Synthetic sequence
GAPGPMGPRGAPGERGRPGLPGAAGAR

SEQ ID NO: 183 - protein, 29 aa, Artificial Sequence
  Synthetic sequence
GAPGPMGPRGAPGERGRPGLPGAAGARGN

SEQ ID NO: 184 - protein, 33 aa, Artificial Sequence
  Synthetic sequence
GAPGPMGPRGAPGERGRPGLPGAAGARGNDGAR

SEQ ID NO: 185 - protein, 34 aa, Artificial Sequence
  Synthetic sequence
GAPGPMGPRGAPGERGRPGLPGAAGARGNDGARG

SEQ ID NO: 186 - protein, 48 aa, Artificial Sequence
  Synthetic sequence
GAPGPMGPRGAPGERGRPGLPGAAGARGNDGARGSDGQPGPPGPPGTA

SEQ ID NO: 187 - protein, 24 aa, Artificial Sequence
  Synthetic sequence
GAPGQRGEPGPQGHAGAQGPPGPP

SEQ ID NO: 188 - protein, 25 aa, Artificial Sequence
  Synthetic sequence
GAPGQRGEPGPQGHAGAQGPPGPPG

SEQ ID NO: 189 - protein, 27 aa, Artificial Sequence
  Synthetic sequence
GAPGQRGEPGPQGHAGAQGPPGPPGIN

SEQ ID NO: 190 - protein, 28 aa, Artificial Sequence
  Synthetic sequence
GAPGQRGEPGPQGHAGAQGPPGPPGING

SEQ ID NO: 191 - protein, 29 aa, Artificial Sequence
  Synthetic sequence
GAPGQRGEPGPQGHAGAQGPPGPPGINGS

SEQ ID NO: 192 - protein, 31 aa, Artificial Sequence
  Synthetic sequence
GAPGQRGEPGPQGHAGAQGPPGPPGINGSPG

SEQ ID NO: 193 - protein, 32 aa, Artificial Sequence
  Synthetic sequence
GAPGQRGEPGPQGHAGAQGPPGPPGINGSPGG

SEQ ID NO: 194 - protein, 33 aa, Artificial Sequence
  Synthetic sequence
GAPGQRGEPGPQGHAGAQGPPGPPGINGSPGGK

SEQ ID NO: 195 - protein, 36 aa, Artificial Sequence
  Synthetic sequence
GAPGQRGEPGPQGHAGAQGPPGPPGINGSPGGKGEM

SEQ ID NO: 196 - protein, 37 aa, Artificial Sequence
  Synthetic sequence
GAPGQRGEPGPQGHAGAQGPPGPPGINGSPGGKGEMG

SEQ ID NO: 197 - protein, 39 aa, Artificial Sequence
  Synthetic sequence
GAPGQRGEPGPQGHAGAQGPPGPPGINGSPGGKGEMGPA

SEQ ID NO: 198 - protein, 48 aa, Artificial Sequence
  Synthetic sequence
GAPGQRGEPGPQGHAGAQGPPGPPGINGSPGGKGEMGPAGIPGAPGLM

SEQ ID NO: 199 - protein, 49 aa, Artificial Sequence
  Synthetic sequence
GAPGQRGEPGPQGHAGAQGPPGPPGINGSPGGKGEMGPAGIPGAPGLMG

SEQ ID NO: 200 - protein, 50 aa, Artificial Sequence
  Synthetic sequence
GAPGQRGEPGPQGHAGAQGPPGPPGINGSPGGKGEMGPAGIPGAPGLMGA

SEQ ID NO: 201 - protein, 51 aa, Artificial Sequence
  Synthetic sequence
GAPGQRGEPGPQGHAGAQGPPGPPGINGSPGGKGEMGPAGIPGAPGLMGAR

SEQ ID NO: 202 - protein, 12 aa, Artificial Sequence
  Synthetic sequence
GAQGPPGPPGIN

SEQ ID NO: 203 - protein, 21 aa, Artificial Sequence
  Synthetic sequence
GARGNDGARGSDGQPGPPGPP

SEQ ID NO: 204 - protein, 24 aa, Artificial Sequence
  Synthetic sequence
GARGNDGARGSDGQPGPPGPPGTA

SEQ ID NO: 205 - protein, 28 aa, Artificial Sequence
  Synthetic sequence
GARGNDGARGSDGQPGPPGPPGTAGFPG

SEQ ID NO: 206 - protein, 32 aa, Artificial Sequence
  Synthetic sequence
GARGNDGARGSDGQPGPPGPPGTAGFPGSPGA

SEQ ID NO: 207 - protein, 33 aa, Artificial Sequence
  Synthetic sequence
GARGNDGARGSDGQPGPPGPPGTAGFPGSPGAK

SEQ ID NO: 208 - protein, 39 aa, Artificial Sequence
  Synthetic sequence
GARGNDGARGSDGQPGPPGPPGTAGFPGSPGAKGEVGPA

SEQ ID NO: 209 - protein, 40 aa, Artificial Sequence
  Synthetic sequence
GARGNDGARGSDGQPGPPGPPGTAGFPGSPGAKGEVGPAG

SEQ ID NO: 210 - protein, 43 aa, Artificial Sequence
  Synthetic sequence
GARGNDGARGSDGQPGPPGPPGTAGFPGSPGAKGEVGPAGSPG

SEQ ID NO: 211 - protein, 45 aa, Artificial Sequence
  Synthetic sequence
GARGNDGARGSDGQPGPPGPPGTAGFPGSPGAKGEVGPAGSPGSN

SEQ ID NO: 212 - protein, 12 aa, Artificial Sequence
  Synthetic sequence
GARGPPGPAGAN

SEQ ID NO: 213 - protein, 17 aa, Artificial Sequence
  Synthetic sequence
GARGPPGPAGANGAPGL

SEQ ID NO: 214 - protein, 18 aa, Artificial Sequence
  Synthetic sequence
GARGPPGPAGANGAPGLR

SEQ ID NO: 215 - protein, 19 aa, Artificial Sequence
  Synthetic sequence
GARGPPGPAGANGAPGLRG

SEQ ID NO: 216 - protein, 20 aa, Artificial Sequence
  Synthetic sequence
GARGPPGPAGANGAPGLRGG

SEQ ID NO: 217 - protein, 21 aa, Artificial Sequence
  Synthetic sequence
GARGPPGPAGANGAPGLRGGA

SEQ ID NO: 218 - protein, 22 aa, Artificial Sequence
  Synthetic sequence
GARGPPGPAGANGAPGLRGGAG

SEQ ID NO: 219 - protein, 23 aa, Artificial Sequence
  Synthetic sequence
GARGPPGPAGANGAPGLRGGAGE

SEQ ID NO: 220 - protein, 25 aa, Artificial Sequence
  Synthetic sequence
GARGPPGPAGANGAPGLRGGAGEPG

SEQ ID NO: 221 - protein, 27 aa, Artificial Sequence
  Synthetic sequence
GARGPPGPAGANGAPGLRGGAGEPGKN

SEQ ID NO: 222 - protein, 28 aa, Artificial Sequence
  Synthetic sequence
GARGPPGPAGANGAPGLRGGAGEPGKNG

SEQ ID NO: 223 - protein, 29 aa, Artificial Sequence
  Synthetic sequence
GARGPPGPAGANGAPGLRGGAGEPGKNGA

SEQ ID NO: 224 - protein, 30 aa, Artificial Sequence
  Synthetic sequence
GARGPPGPAGANGAPGLRGGAGEPGKNGAK

SEQ ID NO: 225 - protein, 32 aa, Artificial Sequence
  Synthetic sequence
GARGPPGPAGANGAPGLRGGAGEPGKNGAKGE

SEQ ID NO: 226 - protein, 34 aa, Artificial Sequence
  Synthetic sequence
GARGPPGPAGANGAPGLRGGAGEPGKNGAKGEPG

SEQ ID NO: 227 - protein, 36 aa, Artificial Sequence
  Synthetic sequence
GARGPPGPAGANGAPGLRGGAGEPGKNGAKGEPGPR

SEQ ID NO: 228 - protein, 39 aa, Artificial Sequence
  Synthetic sequence
GARGPPGPAGANGAPGLRGGAGEPGKNGAKGEPGPRGER

SEQ ID NO: 229 - protein, 18 aa, Artificial Sequence
  Synthetic sequence
GARGSDGQPGPPGPPGTA

SEQ ID NO: 230 - protein, 27 aa, Artificial Sequence
  Synthetic sequence
GARGSDGQPGPPGPPGTAGFPGSPGAK

SEQ ID NO: 231 - protein, 33 aa, Artificial Sequence
  Synthetic sequence
GARGSDGQPGPPGPPGTAGFPGSPGAKGEVGPA

SEQ ID NO: 232 - protein, 27 aa, Artificial Sequence
  Synthetic sequence
GDKGDTGPPGPQGLQGLPGTGGPPGEN

SEQ ID NO: 233 - protein, 12 aa, Artificial Sequence
  Synthetic sequence
GEKGETGAPGLK

SEQ ID NO: 234 - protein, 21 aa, Artificial Sequence
  Synthetic sequence
GEKGETGAPGLKGENGLPGEN

SEQ ID NO: 235 - protein, 27 aa, Artificial Sequence
  Synthetic sequence
GEKGETGAPGLKGENGLPGENGAPGPM

SEQ ID NO: 236 - protein, 30 aa, Artificial Sequence
  Synthetic sequence
GEKGETGAPGLKGENGLPGENGAPGPMGPR

SEQ ID NO: 237 - protein, 48 aa, Artificial Sequence
  Synthetic sequence
GEKGETGAPGLKGENGLPGENGAPGPMGPRGAPGERGRPGLPGAAGAR

SEQ ID NO: 238 - protein, 15 aa, Artificial Sequence
  Synthetic sequence
GEMGPAGIPGAPGLM

SEQ ID NO: 239 - protein, 18 aa, Artificial Sequence
  Synthetic sequence
GEMGPAGIPGAPGLMGAR

SEQ ID NO: 240 - protein, 24 aa, Artificial Sequence
  Synthetic sequence
GEMGPAGIPGAPGLMGARGPPGPA

SEQ ID NO: 241 - protein, 27 aa, Artificial Sequence
  Synthetic sequence
GEMGPAGIPGAPGLMGARGPPGPAGAN

SEQ ID NO: 242 - protein, 33 aa, Artificial Sequence
  Synthetic sequence
GEMGPAGIPGAPGLMGARGPPGPAGANGAPGLR

SEQ ID NO: 243 - protein, 42 aa, Artificial Sequence
  Synthetic sequence
GEMGPAGIPGAPGLMGARGPPGPAGANGAPGLRGGAGEPGKN

SEQ ID NO: 244 - protein, 15 aa, Artificial Sequence
  Synthetic sequence
GENGLPGENGAPGPM

SEQ ID NO: 245 - protein, 18 aa, Artificial Sequence
  Synthetic sequence
GENGLPGENGAPGPMGPR

SEQ ID NO: 246 - protein, 19 aa, Artificial Sequence
  Synthetic sequence
GENGLPGENGAPGPMGPRG

SEQ ID NO: 247 - protein, 22 aa, Artificial Sequence
  Synthetic sequence
GENGLPGENGAPGPMGPRGAPG

SEQ ID NO: 248 - protein, 24 aa, Artificial Sequence
  Synthetic sequence
GENGLPGENGAPGPMGPRGAPGER

SEQ ID NO: 249 - protein, 25 aa, Artificial Sequence
  Synthetic sequence
GENGLPGENGAPGPMGPRGAPGERG

SEQ ID NO: 250 - protein, 26 aa, Artificial Sequence
  Synthetic sequence
GENGLPGENGAPGPMGPRGAPGERGR

SEQ ID NO: 251 - protein, 33 aa, Artificial Sequence
  Synthetic sequence
GENGLPGENGAPGPMGPRGAPGERGRPGLPGAA

SEQ ID NO: 252 - protein, 35 aa, Artificial Sequence
  Synthetic sequence
GENGLPGENGAPGPMGPRGAPGERGRPGLPGAAGA

SEQ ID NO: 253 - protein, 36 aa, Artificial Sequence
  Synthetic sequence
GENGLPGENGAPGPMGPRGAPGERGRPGLPGAAGAR

SEQ ID NO: 254 - protein, 38 aa, Artificial Sequence
  Synthetic sequence
GENGLPGENGAPGPMGPRGAPGERGRPGLPGAAGARGN

SEQ ID NO: 255 - protein, 27 aa, Artificial Sequence
  Synthetic sequence
GEPGANGLPGAAGERGAPGFRGPAGPN

SEQ ID NO: 256 - protein, 25 aa, Artificial Sequence
  Synthetic sequence
GEPGPKGDAGAPGAPGGKGDAGAPG

SEQ ID NO: 257 - protein, 26 aa, Artificial Sequence
  Synthetic sequence
GEPGPKGDAGAPGAPGGKGDAGAPGE

SEQ ID NO: 258 - protein, 21 aa, Artificial Sequence
  Synthetic sequence
GEPGPQGHAGAQGPPGPPGIN

SEQ ID NO: 259 - protein, 33 aa, Artificial Sequence
  Synthetic sequence
GEPGPQGHAGAQGPPGPPGINGSPGGKGEMGPA

SEQ ID NO: 260 - protein, 42 aa, Artificial Sequence
  Synthetic sequence
GEPGPQGHAGAQGPPGPPGINGSPGGKGEMGPAGIPGAPGLM

SEQ ID NO: 261 - protein, 28 aa, Artificial Sequence
  Synthetic sequence
GEPGPRGERGEAGIPGVPGAKGEDGKDG

SEQ ID NO: 262 - protein, 21 aa, Artificial Sequence
  Synthetic sequence
GEPGQAGPSGPPGPPGAIGPS

SEQ ID NO: 263 - protein, 27 aa, Artificial Sequence
  Synthetic sequence
GEPGQAGPSGPPGPPGAIGPSGPAGKD

SEQ ID NO: 264 - protein, 25 aa, Artificial Sequence
  Synthetic sequence
GEPGRDGVPGGPGMRGMPGSPGGPG

SEQ ID NO: 265 - protein, 16 aa, Artificial Sequence
  Synthetic sequence
GERGEAGIPGVPGAKG

SEQ ID NO: 266 - protein, 22 aa, Artificial Sequence
  Synthetic sequence
GERGEAGIPGVPGAKGEDGKDG

SEQ ID NO: 267 - protein, 30 aa, Artificial Sequence
  Synthetic sequence
GERGEAGIPGVPGAKGEDGKDGSPGEPGAN

SEQ ID NO: 268 - protein, 17 aa, Artificial Sequence
  Synthetic sequence
GERGGPGGPGPQGPPGK

SEQ ID NO: 269 - protein, 18 aa, Artificial Sequence
  Synthetic sequence
GERGGPGGPGPQGPPGKN

SEQ ID NO: 270 - protein, 19 aa, Artificial Sequence
  Synthetic sequence
GERGGPGGPGPQGPPGKNG

SEQ ID NO: 271 - protein, 23 aa, Artificial Sequence
  Synthetic sequence
GERGGPGGPGPQGPPGKNGETGP

SEQ ID NO: 272 - protein, 24 aa, Artificial Sequence
  Synthetic sequence
GERGGPGGPGPQGPPGKNGETGPQ

SEQ ID NO: 273 - protein, 25 aa, Artificial Sequence
  Synthetic sequence
GERGGPGGPGPQGPPGKNGETGPQG

SEQ ID NO: 274 - protein, 27 aa, Artificial Sequence
  Synthetic sequence
GERGGPGGPGPQGPPGKNGETGPQGPP

SEQ ID NO: 275 - protein, 28 aa, Artificial Sequence
  Synthetic sequence
GERGGPGGPGPQGPPGKNGETGPQGPPG

SEQ ID NO: 276 - protein, 29 aa, Artificial Sequence
  Synthetic sequence
GERGGPGGPGPQGPPGKNGETGPQGPPGP

SEQ ID NO: 277 - protein, 30 aa, Artificial Sequence
  Synthetic sequence
GERGGPGGPGPQGPPGKNGETGPQGPPGPT

SEQ ID NO: 278 - protein, 31 aa, Artificial Sequence
  Synthetic sequence
GERGGPGGPGPQGPPGKNGETGPQGPPGPTG

SEQ ID NO: 279 - protein, 33 aa, Artificial Sequence
  Synthetic sequence
GERGGPGGPGPQGPPGKNGETGPQGPPGPTGPG

SEQ ID NO: 280 - protein, 34 aa, Artificial Sequence
  Synthetic sequence
GERGGPGGPGPQGPPGKNGETGPQGPPGPTGPGG

SEQ ID NO: 281 - protein, 35 aa, Artificial Sequence
  Synthetic sequence
GERGGPGGPGPQGPPGKNGETGPQGPPGPTGPGGD

SEQ ID NO: 282 - protein, 36 aa, Artificial Sequence
  Synthetic sequence
GERGGPGGPGPQGPPGKNGETGPQGPPGPTGPGGDK

SEQ ID NO: 283 - protein, 37 aa, Artificial Sequence
  Synthetic sequence
GERGGPGGPGPQGPPGKNGETGPQGPPGPTGPGGDKG

SEQ ID NO: 284 - protein, 38 aa, Artificial Sequence
  Synthetic sequence
GERGGPGGPGPQGPPGKNGETGPQGPPGPTGPGGDKGD

SEQ ID NO: 285 - protein, 40 aa, Artificial Sequence
  Synthetic sequence
GERGGPGGPGPQGPPGKNGETGPQGPPGPTGPGGDKGDTG

SEQ ID NO: 286 - protein, 43 aa, Artificial Sequence
  Synthetic sequence
GERGGPGGPGPQGPPGKNGETGPQGPPGPTGPGGDKGDTGPPG

SEQ ID NO: 287 - protein, 45 aa, Artificial Sequence
  Synthetic sequence
GERGGPGGPGPQGPPGKNGETGPQGPPGPTGPGGDKGDTGPPGPQ

SEQ ID NO: 288 - protein, 46 aa, Artificial Sequence
  Synthetic sequence
GERGGPGGPGPQGPPGKNGETGPQGPPGPTGPGGDKGDTGPPGPQG

SEQ ID NO: 289 - protein, 48 aa, Artificial Sequence
  Synthetic sequence
GERGGPGGPGPQGPPGKNGETGPQGPPGPTGPGGDKGDTGPPGPQGLQ

SEQ ID NO: 290 - protein, 49 aa, Artificial Sequence
  Synthetic sequence
GERGGPGGPGPQGPPGKNGETGPQGPPGPTGPGGDKGDTGPPGPQGLQG

SEQ ID NO: 291 - protein, 12 aa, Artificial Sequence
  Synthetic sequence
GERGLPGPPGIK

SEQ ID NO: 292 - protein, 15 aa, Artificial Sequence
  Synthetic sequence
GERGLPGPPGIKGPA

SEQ ID NO: 293 - protein, 24 aa, Artificial Sequence
  Synthetic sequence
GERGLPGPPGIKGPAGIPGFPGMK

SEQ ID NO: 294 - protein, 21 aa, Artificial Sequence
  Synthetic sequence
GESGRPGPPGPSGPRGQPGVM

SEQ ID NO: 295 - protein, 29 aa, Artificial Sequence
  Synthetic sequence
GESGRPGPPGPSGPRGQPGVMGFPGPKGN

SEQ ID NO: 296 - protein, 21 aa, Artificial Sequence
  Synthetic sequence
GESGRPGRPGERGLPGPPGIK

SEQ ID NO: 297 - protein, 22 aa, Artificial Sequence
  Synthetic sequence
GESGRPGRPGERGLPGPPGIKG

SEQ ID NO: 298 - protein, 24 aa, Artificial Sequence
  Synthetic sequence
GESGRPGRPGERGLPGPPGIKGPA

SEQ ID NO: 299 - protein, 33 aa, Artificial Sequence
  Synthetic sequence
GESGRPGRPGERGLPGPPGIKGPAGIPGFPGMK

SEQ ID NO: 300 - protein, 18 aa, Artificial Sequence
  Synthetic sequence
GETGAPGLKGENGLPGEN

SEQ ID NO: 301 - protein, 27 aa, Artificial Sequence
  Synthetic sequence
GETGAPGLKGENGLPGENGAPGPMGPR

SEQ ID NO: 302 - protein, 45 aa, Artificial Sequence
  Synthetic sequence
GETGAPGLKGENGLPGENGAPGPMGPRGAPGERGRPGLPGAAGAR

SEQ ID NO: 303 - protein, 47 aa, Artificial Sequence
  Synthetic sequence
GETGAPGLKGENGLPGENGAPGPMGPRGAPGERGRPGLPGAAGARGN

SEQ ID NO: 304 - protein, 15 aa, Artificial Sequence
  Synthetic sequence
GETGPQGPPGPTGPG

SEQ ID NO: 305 - protein, 17 aa, Artificial Sequence
  Synthetic sequence
GETGPQGPPGPTGPGGD

SEQ ID NO: 306 - protein, 22 aa, Artificial Sequence
  Synthetic sequence
GETGPQGPPGPTGPGGDKGDTG

SEQ ID NO: 307 - protein, 25 aa, Artificial Sequence
  Synthetic sequence
GETGPQGPPGPTGPGGDKGDTGPPG

SEQ ID NO: 308 - protein, 27 aa, Artificial Sequence
  Synthetic sequence
GETGPQGPPGPTGPGGDKGDTGPPGPQ

SEQ ID NO: 309 - protein, 28 aa, Artificial Sequence
  Synthetic sequence
GETGPQGPPGPTGPGGDKGDTGPPGPQG

SEQ ID NO: 310 - protein, 16 aa, Artificial Sequence
  Synthetic sequence
GEVGPAGSPGSNGAPG

SEQ ID NO: 311 - protein, 17 aa, Artificial Sequence
  Synthetic sequence
GEVGPAGSPGSNGAPGQ

SEQ ID NO: 312 - protein, 20 aa, Artificial Sequence
  Synthetic sequence
GEVGPAGSPGSNGAPGQRGE

SEQ ID NO: 313 - protein, 21 aa, Artificial Sequence
  Synthetic sequence
GEVGPAGSPGSNGAPGQRGEP

SEQ ID NO: 314 - protein, 22 aa, Artificial Sequence
  Synthetic sequence
GEVGPAGSPGSNGAPGQRGEPG

SEQ ID NO: 315 - protein, 23 aa, Artificial Sequence
  Synthetic sequence
GEVGPAGSPGSNGAPGQRGEPGP

SEQ ID NO: 316 - protein, 24 aa, Artificial Sequence
  Synthetic sequence
GEVGPAGSPGSNGAPGQRGEPGPQ

SEQ ID NO: 317 - protein, 25 aa, Artificial Sequence
  Synthetic sequence
GEVGPAGSPGSNGAPGQRGEPGPQG

SEQ ID NO: 318 - protein, 26 aa, Artificial Sequence
  Synthetic sequence
GEVGPAGSPGSNGAPGQRGEPGPQGH

SEQ ID NO: 319 - protein, 27 aa, Artificial Sequence
  Synthetic sequence
GEVGPAGSPGSNGAPGQRGEPGPQGHA

SEQ ID NO: 320 - protein, 28 aa, Artificial Sequence
  Synthetic sequence
GEVGPAGSPGSNGAPGQRGEPGPQGHAG

SEQ ID NO: 321 - protein, 29 aa, Artificial Sequence
  Synthetic sequence
GEVGPAGSPGSNGAPGQRGEPGPQGHAGA

SEQ ID NO: 322 - protein, 30 aa, Artificial Sequence
  Synthetic sequence
GEVGPAGSPGSNGAPGQRGEPGPQGHAGAQ

SEQ ID NO: 323 - protein, 31 aa, Artificial Sequence
  Synthetic sequence
GEVGPAGSPGSNGAPGQRGEPGPQGHAGAQG

SEQ ID NO: 324 - protein, 32 aa, Artificial Sequence
  Synthetic sequence
GEVGPAGSPGSNGAPGQRGEPGPQGHAGAQGP

SEQ ID NO: 325 - protein, 33 aa, Artificial Sequence
  Synthetic sequence
GEVGPAGSPGSNGAPGQRGEPGPQGHAGAQGPP

SEQ ID NO: 326 - protein, 34 aa, Artificial Sequence
  Synthetic sequence
GEVGPAGSPGSNGAPGQRGEPGPQGHAGAQGPPG

SEQ ID NO: 327 - protein, 35 aa, Artificial Sequence
  Synthetic sequence
GEVGPAGSPGSNGAPGQRGEPGPQGHAGAQGPPGP

SEQ ID NO: 328 - protein, 36 aa, Artificial Sequence
  Synthetic sequence
GEVGPAGSPGSNGAPGQRGEPGPQGHAGAQGPPGPP

SEQ ID NO: 329 - protein, 37 aa, Artificial Sequence
  Synthetic sequence
GEVGPAGSPGSNGAPGQRGEPGPQGHAGAQGPPGPPG

SEQ ID NO: 330 - protein, 39 aa, Artificial Sequence
  Synthetic sequence
GEVGPAGSPGSNGAPGQRGEPGPQGHAGAQGPPGPPGIN

SEQ ID NO: 331 - protein, 40 aa, Artificial Sequence
  Synthetic sequence
GEVGPAGSPGSNGAPGQRGEPGPQGHAGAQGPPGPPGING

SEQ ID NO: 332 - protein, 41 aa, Artificial Sequence
  Synthetic sequence
GEVGPAGSPGSNGAPGQRGEPGPQGHAGAQGPPGPPGINGS

SEQ ID NO: 333 - protein, 43 aa, Artificial Sequence
  Synthetic sequence
GEVGPAGSPGSNGAPGQRGEPGPQGHAGAQGPPGPPGINGSPG

SEQ ID NO: 334 - protein, 44 aa, Artificial Sequence
  Synthetic sequence
GEVGPAGSPGSNGAPGQRGEPGPQGHAGAQGPPGPPGINGSPGG

SEQ ID NO: 335 - protein, 45 aa, Artificial Sequence
  Synthetic sequence
GEVGPAGSPGSNGAPGQRGEPGPQGHAGAQGPPGPPGINGSPGGK

SEQ ID NO: 336 - protein, 46 aa, Artificial Sequence
  Synthetic sequence
GEVGPAGSPGSNGAPGQRGEPGPQGHAGAQGPPGPPGINGSPGGKG

SEQ ID NO: 337 - protein, 48 aa, Artificial Sequence
  Synthetic sequence
GEVGPAGSPGSNGAPGQRGEPGPQGHAGAQGPPGPPGINGSPGGKGEM

SEQ ID NO: 338 - protein, 49 aa, Artificial Sequence
  Synthetic sequence
GEVGPAGSPGSNGAPGQRGEPGPQGHAGAQGPPGPPGINGSPGGKGEMG

SEQ ID NO: 339 - protein, 51 aa, Artificial Sequence
  Synthetic sequence
GEVGPAGSPGSNGAPGQRGEPGPQGHAGAQGPPGPPGINGSPGGKGEMGPA

SEQ ID NO: 340 - protein, 52 aa, Artificial Sequence
  Synthetic sequence
GEVGPAGSPGSNGAPGQRGEPGPQGHAGAQGPPGPPGINGSPGGKGEMGPAG

SEQ ID NO: 341 - protein, 18 aa, Artificial Sequence
  Synthetic sequence
GFDGRNGEKGETGAPGLK

SEQ ID NO: 342 - protein, 19 aa, Artificial Sequence
  Synthetic sequence
GFDGRNGEKGETGAPGLKG

SEQ ID NO: 343 - protein, 21 aa, Artificial Sequence
  Synthetic sequence
GFDGRNGEKGETGAPGLKGEN

SEQ ID NO: 344 - protein, 22 aa, Artificial Sequence
  Synthetic sequence
GFDGRNGEKGETGAPGLKGENG

SEQ ID NO: 345 - protein, 27 aa, Artificial Sequence
  Synthetic sequence
GFDGRNGEKGETGAPGLKGENGLPGEN

SEQ ID NO: 346 - protein, 36 aa, Artificial Sequence
  Synthetic sequence
GFDGRNGEKGETGAPGLKGENGLPGENGAPGPMGPR

SEQ ID NO: 347 - protein, 51 aa, Artificial Sequence
  Synthetic sequence
GFDGRNGEKGETGAPGLKGENGLPGENGAPGPMGPRGAPGERGRPGLPGAA

SEQ ID NO: 348 - protein, 27 aa, Artificial Sequence
  Synthetic sequence
GFPGMKGHRGFDGRNGEKGETGAPGLK

SEQ ID NO: 349 - protein, 30 aa, Artificial Sequence
  Synthetic sequence
GFPGMKGHRGFDGRNGEKGETGAPGLKGEN

SEQ ID NO: 350 - protein, 15 aa, Artificial Sequence
  Synthetic sequence
GFPGPKGNDGAPGKN

SEQ ID NO: 351 - protein, 18 aa, Artificial Sequence
  Synthetic sequence
GFPGPKGNDGAPGKNGER

SEQ ID NO: 352 - protein, 19 aa, Artificial Sequence
  Synthetic sequence
GFPGPKGNDGAPGKNGERG

SEQ ID NO: 353 - protein, 20 aa, Artificial Sequence
  Synthetic sequence
GFPGPKGNDGAPGKNGERGG

SEQ ID NO: 354 - protein, 21 aa, Artificial Sequence
  Synthetic sequence
GFPGPKGNDGAPGKNGERGGP

SEQ ID NO: 355 - protein, 22 aa, Artificial Sequence
  Synthetic sequence
GFPGPKGNDGAPGKNGERGGPG

SEQ ID NO: 356 - protein, 23 aa, Artificial Sequence
  Synthetic sequence
GFPGPKGNDGAPGKNGERGGPGG

SEQ ID NO: 357 - protein, 24 aa, Artificial Sequence
  Synthetic sequence
GFPGPKGNDGAPGKNGERGGPGGP

SEQ ID NO: 358 - protein, 25 aa, Artificial Sequence
  Synthetic sequence
GFPGPKGNDGAPGKNGERGGPGGPG

SEQ ID NO: 359 - protein, 26 aa, Artificial Sequence
  Synthetic sequence
GFPGPKGNDGAPGKNGERGGPGGPGP

SEQ ID NO: 360 - protein, 27 aa, Artificial Sequence
  Synthetic sequence
GFPGPKGNDGAPGKNGERGGPGGPGPQ

SEQ ID NO: 361 - protein, 28 aa, Artificial Sequence
  Synthetic sequence
GFPGPKGNDGAPGKNGERGGPGGPGPQG

SEQ ID NO: 362 - protein, 29 aa, Artificial Sequence
  Synthetic sequence
GFPGPKGNDGAPGKNGERGGPGGPGPQGP

SEQ ID NO: 363 - protein, 30 aa, Artificial Sequence
  Synthetic sequence
GFPGPKGNDGAPGKNGERGGPGGPGPQGPP

SEQ ID NO: 364 - protein, 31 aa, Artificial Sequence
  Synthetic sequence
GFPGPKGNDGAPGKNGERGGPGGPGPQGPPG

SEQ ID NO: 365 - protein, 32 aa, Artificial Sequence
  Synthetic sequence
GFPGPKGNDGAPGKNGERGGPGGPGPQGPPGK

SEQ ID NO: 366 - protein, 33 aa, Artificial Sequence
  Synthetic sequence
GFPGPKGNDGAPGKNGERGGPGGPGPQGPPGKN

SEQ ID NO: 367 - protein, 34 aa, Artificial Sequence
  Synthetic sequence
GFPGPKGNDGAPGKNGERGGPGGPGPQGPPGKNG

SEQ ID NO: 368 - protein, 35 aa, Artificial Sequence
  Synthetic sequence
GFPGPKGNDGAPGKNGERGGPGGPGPQGPPGKNGE

SEQ ID NO: 369 - protein, 36 aa, Artificial Sequence
  Synthetic sequence
GFPGPKGNDGAPGKNGERGGPGGPGPQGPPGKNGET

SEQ ID NO: 370 - protein, 37 aa, Artificial Sequence
  Synthetic sequence
GFPGPKGNDGAPGKNGERGGPGGPGPQGPPGKNGETG

SEQ ID NO: 371 - protein, 38 aa, Artificial Sequence
  Synthetic sequence
GFPGPKGNDGAPGKNGERGGPGGPGPQGPPGKNGETGP

SEQ ID NO: 372 - protein, 39 aa, Artificial Sequence
  Synthetic sequence
GFPGPKGNDGAPGKNGERGGPGGPGPQGPPGKNGETGPQ

SEQ ID NO: 373 - protein, 40 aa, Artificial Sequence
  Synthetic sequence
GFPGPKGNDGAPGKNGERGGPGGPGPQGPPGKNGETGPQG

SEQ ID NO: 374 - protein, 43 aa, Artificial Sequence
  Synthetic sequence
GFPGPKGNDGAPGKNGERGGPGGPGPQGPPGKNGETGPQGPPG

SEQ ID NO: 375 - protein, 46 aa, Artificial Sequence
  Synthetic sequence
GFPGPKGNDGAPGKNGERGGPGGPGPQGPPGKNGETGPQGPPGPTG

SEQ ID NO: 376 - protein, 51 aa, Artificial Sequence
  Synthetic sequence
GFPGPKGNDGAPGKNGERGGPGGPGPQGPPGKNGETGPQGPPGPTGPGGDK

SEQ ID NO: 377 - protein, 13 aa, Artificial Sequence
  Synthetic sequence
GFPGSPGAKGEVG

SEQ ID NO: 378 - protein, 14 aa, Artificial Sequence
  Synthetic sequence
GFPGSPGAKGEVGP

SEQ ID NO: 379 - protein, 15 aa, Artificial Sequence
  Synthetic sequence
GFPGSPGAKGEVGPA

SEQ ID NO: 380 - protein, 16 aa, Artificial Sequence
  Synthetic sequence
GFPGSPGAKGEVGPAG

SEQ ID NO: 381 - protein, 17 aa, Artificial Sequence
  Synthetic sequence
GFPGSPGAKGEVGPAGS

SEQ ID NO: 382 - protein, 19 aa, Artificial Sequence
  Synthetic sequence
GFPGSPGAKGEVGPAGSPG

SEQ ID NO: 383 - protein, 21 aa, Artificial Sequence
  Synthetic sequence
GFPGSPGAKGEVGPAGSPGSN

SEQ ID NO: 384 - protein, 22 aa, Artificial Sequence
  Synthetic sequence
GFPGSPGAKGEVGPAGSPGSNG

SEQ ID NO: 385 - protein, 23 aa, Artificial Sequence
  Synthetic sequence
GFPGSPGAKGEVGPAGSPGSNGA

SEQ ID NO: 386 - protein, 25 aa, Artificial Sequence
  Synthetic sequence
GFPGSPGAKGEVGPAGSPGSNGAPG

SEQ ID NO: 387 - protein, 27 aa, Artificial Sequence
  Synthetic sequence
GFPGSPGAKGEVGPAGSPGSNGAPGQR

SEQ ID NO: 388 - protein, 28 aa, Artificial Sequence
  Synthetic sequence
GFPGSPGAKGEVGPAGSPGSNGAPGQRG

SEQ ID NO: 389 - protein, 29 aa, Artificial Sequence
  Synthetic sequence
GFPGSPGAKGEVGPAGSPGSNGAPGQRGE

SEQ ID NO: 390 - protein, 30 aa, Artificial Sequence
  Synthetic sequence
GFPGSPGAKGEVGPAGSPGSNGAPGQRGEP

SEQ ID NO: 391 - protein, 31 aa, Artificial Sequence
  Synthetic sequence
GFPGSPGAKGEVGPAGSPGSNGAPGQRGEPG

SEQ ID NO: 392 - protein, 33 aa, Artificial Sequence
  Synthetic sequence
GFPGSPGAKGEVGPAGSPGSNGAPGQRGEPGPQ

SEQ ID NO: 393 - protein, 34 aa, Artificial Sequence
  Synthetic sequence
GFPGSPGAKGEVGPAGSPGSNGAPGQRGEPGPQG

SEQ ID NO: 394 - protein, 35 aa, Artificial Sequence
  Synthetic sequence
GFPGSPGAKGEVGPAGSPGSNGAPGQRGEPGPQGH

SEQ ID NO: 395 - protein, 36 aa, Artificial Sequence
  Synthetic sequence
GFPGSPGAKGEVGPAGSPGSNGAPGQRGEPGPQGHA

SEQ ID NO: 396 - protein, 37 aa, Artificial Sequence
  Synthetic sequence
GFPGSPGAKGEVGPAGSPGSNGAPGQRGEPGPQGHAG

SEQ ID NO: 397 - protein, 38 aa, Artificial Sequence
  Synthetic sequence
GFPGSPGAKGEVGPAGSPGSNGAPGQRGEPGPQGHAGA

SEQ ID NO: 398 - protein, 39 aa, Artificial Sequence
  Synthetic sequence
GFPGSPGAKGEVGPAGSPGSNGAPGQRGEPGPQGHAGAQ

SEQ ID NO: 399 - protein, 40 aa, Artificial Sequence
  Synthetic sequence
GFPGSPGAKGEVGPAGSPGSNGAPGQRGEPGPQGHAGAQG

SEQ ID NO: 400 - protein, 42 aa, Artificial Sequence
  Synthetic sequence
GFPGSPGAKGEVGPAGSPGSNGAPGQRGEPGPQGHAGAQGPP

SEQ ID NO: 401 - protein, 43 aa, Artificial Sequence
  Synthetic sequence
GFPGSPGAKGEVGPAGSPGSNGAPGQRGEPGPQGHAGAQGPPG

SEQ ID NO: 402 - protein, 46 aa, Artificial Sequence
  Synthetic sequence
GFPGSPGAKGEVGPAGSPGSNGAPGQRGEPGPQGHAGAQGPPGPPG

SEQ ID NO: 403 - protein, 48 aa, Artificial Sequence
  Synthetic sequence
GFPGSPGAKGEVGPAGSPGSNGAPGQRGEPGPQGHAGAQGPPGPPGIN

SEQ ID NO: 404 - protein, 49 aa, Artificial Sequence
  Synthetic sequence
GFPGSPGAKGEVGPAGSPGSNGAPGQRGEPGPQGHAGAQGPPGPPGING

SEQ ID NO: 405 - protein, 52 aa, Artificial Sequence
  Synthetic sequence
GFPGSPGAKGEVGPAGSPGSNGAPGQRGEPGPQGHAGAQGPPGPPGINGSPG

SEQ ID NO: 406 - protein, 54 aa, Artificial Sequence
  Synthetic sequence
GFPGSPGAKGEVGPAGSPGSNGAPGQRGEPGPQGHAGAQGPPGPPGINGSPGGK

SEQ ID NO: 407 - protein, 27 aa, Artificial Sequence
  Synthetic sequence
GFRGPAGPNGIPGEKGPAGERGAPGPA

SEQ ID NO: 408 - protein, 18 aa, Artificial Sequence
  Synthetic sequence
GGAGEPGKNGAKGEPGPR

SEQ ID NO: 409 - protein, 27 aa, Artificial Sequence
  Synthetic sequence
GGAGEPGKNGAKGEPGPRGERGEAGIP

SEQ ID NO: 410 - protein, 28 aa, Artificial Sequence
  Synthetic sequence
GGAGEPGKNGAKGEPGPRGERGEAGIPG

SEQ ID NO: 411 - protein, 18 aa, Artificial Sequence
  Synthetic sequence
GGKGEMGPAGIPGAPGLM

SEQ ID NO: 412 - protein, 20 aa, Artificial Sequence
  Synthetic sequence
GGKGEMGPAGIPGAPGLMGA

SEQ ID NO: 413 - protein, 21 aa, Artificial Sequence
  Synthetic sequence
GGKGEMGPAGIPGAPGLMGAR

SEQ ID NO: 414 - protein, 32 aa, Artificial Sequence
  Synthetic sequence
GGPGGPGPQGPPGKNGETGPQGPPGPTGPGGD

SEQ ID NO: 415 - protein, 48 aa, Artificial Sequence
  Synthetic sequence
GGPGMRGMPGSPGGPGSDGKPGPPGSQGESGRPGPPGPSGPRGQPGVM

SEQ ID NO: 416 - protein, 25 aa, Artificial Sequence
  Synthetic sequence
GGPGSDGKPGPPGSQGESGRPGPPG

SEQ ID NO: 417 - protein, 27 aa, Artificial Sequence
  Synthetic sequence
GGPGSDGKPGPPGSQGESGRPGPPGPS

SEQ ID NO: 418 - protein, 30 aa, Artificial Sequence
  Synthetic sequence
GGPGSDGKPGPPGSQGESGRPGPPGPSGPR

SEQ ID NO: 419 - protein, 32 aa, Artificial Sequence
  Synthetic sequence
GGPGSDGKPGPPGSQGESGRPGPPGPSGPRGQ

SEQ ID NO: 420 - protein, 36 aa, Artificial Sequence
  Synthetic sequence
GGPGSDGKPGPPGSQGESGRPGPPGPSGPRGQPGVM

SEQ ID NO: 421 - protein, 15 aa, Artificial Sequence
  Synthetic sequence
GHAGAQGPPGPPGIN

SEQ ID NO: 422 - protein, 16 aa, Artificial Sequence
  Synthetic sequence
GHAGAQGPPGPPGING

SEQ ID NO: 423 - protein, 19 aa, Artificial Sequence
  Synthetic sequence
GHAGAQGPPGPPGINGSPG

SEQ ID NO: 424 - protein, 21 aa, Artificial Sequence
  Synthetic sequence
GHAGAQGPPGPPGINGSPGGK

SEQ ID NO: 425 - protein, 25 aa, Artificial Sequence
  Synthetic sequence
GHAGAQGPPGPPGINGSPGGKGEMG

SEQ ID NO: 426 - protein, 27 aa, Artificial Sequence
  Synthetic sequence
GHAGAQGPPGPPGINGSPGGKGEMGPA

SEQ ID NO: 427 - protein, 36 aa, Artificial Sequence
  Synthetic sequence
GHAGAQGPPGPPGINGSPGGKGEMGPAGIPGAPGLM

SEQ ID NO: 428 - protein, 37 aa, Artificial Sequence
  Synthetic sequence
GHAGAQGPPGPPGINGSPGGKGEMGPAGIPGAPGLMG

SEQ ID NO: 429 - protein, 38 aa, Artificial Sequence
  Synthetic sequence
GHAGAQGPPGPPGINGSPGGKGEMGPAGIPGAPGLMGA

SEQ ID NO: 430 - protein, 39 aa, Artificial Sequence
  Synthetic sequence
GHAGAQGPPGPPGINGSPGGKGEMGPAGIPGAPGLMGAR

SEQ ID NO: 431 - protein, 45 aa, Artificial Sequence
  Synthetic sequence
GHAGAQGPPGPPGINGSPGGKGEMGPAGIPGAPGLMGARGPPGPA

SEQ ID NO: 432 - protein, 48 aa, Artificial Sequence
  Synthetic sequence
GHAGAQGPPGPPGINGSPGGKGEMGPAGIPGAPGLMGARGPPGPAGAN

SEQ ID NO: 433 - protein, 54 aa, Artificial Sequence
  Synthetic sequence
GHAGAQGPPGPPGINGSPGGKGEMGPAGIPGAPGLMGARGPPGPAGANGAPGLR

SEQ ID NO: 434 - protein, 19 aa, Artificial Sequence
  Synthetic sequence
GHPGSPGSPGYQGPPGEPG

SEQ ID NO: 435 - protein, 21 aa, Artificial Sequence
  Synthetic sequence
GHPGSPGSPGYQGPPGEPGQA

SEQ ID NO: 436 - protein, 22 aa, Artificial Sequence
  Synthetic sequence
GHPGSPGSPGYQGPPGEPGQAG

SEQ ID NO: 437 - protein, 24 aa, Artificial Sequence
  Synthetic sequence
GHPGSPGSPGYQGPPGEPGQAGPS

SEQ ID NO: 438 - protein, 36 aa, Artificial Sequence
  Synthetic sequence
GHPGSPGSPGYQGPPGEPGQAGPSGPPGPPGAIGPS

SEQ ID NO: 439 - protein, 39 aa, Artificial Sequence
  Synthetic sequence
GHPGSPGSPGYQGPPGEPGQAGPSGPPGPPGAIGPSGPA

SEQ ID NO: 440 - protein, 54 aa, Artificial Sequence
  Synthetic sequence
GHPGSPGSPGYQGPPGEPGQAGPSGPPGPPGAIGPSGPAGKDGESGRPGRPGER

SEQ ID NO: 441 - protein, 21 aa, Artificial Sequence
  Synthetic sequence
GHRGFDGRNGEKGETGAPGLK

SEQ ID NO: 442 - protein, 24 aa, Artificial Sequence
  Synthetic sequence
GHRGFDGRNGEKGETGAPGLKGEN

SEQ ID NO: 443 - protein, 25 aa, Artificial Sequence
  Synthetic sequence
GHRGFDGRNGEKGETGAPGLKGENG

SEQ ID NO: 444 - protein, 30 aa, Artificial Sequence
  Synthetic sequence
GHRGFDGRNGEKGETGAPGLKGENGLPGEN

SEQ ID NO: 445 - protein, 39 aa, Artificial Sequence
  Synthetic sequence
GHRGFDGRNGEKGETGAPGLKGENGLPGENGAPGPMGPR

SEQ ID NO: 446 - protein, 45 aa, Artificial Sequence
  Synthetic sequence
GHRGFDGRNGEKGETGAPGLKGENGLPGENGAPGPMGPRGAPGER

SEQ ID NO: 447 - protein, 9 aa, Artificial Sequence
  Synthetic sequence
GIKGPAGIP

SEQ ID NO: 448 - protein, 13 aa, Artificial Sequence
  Synthetic sequence
GIKGPAGIPGFPG

SEQ ID NO: 449 - protein, 16 aa, Artificial Sequence
  Synthetic sequence
GIKGPAGIPGFPGMKG

SEQ ID NO: 450 - protein, 9 aa, Artificial Sequence
  Synthetic sequence
GIPGAPGLM

SEQ ID NO: 451 - protein, 10 aa, Artificial Sequence
  Synthetic sequence
GIPGAPGLMG

SEQ ID NO: 452 - protein, 11 aa, Artificial Sequence
  Synthetic sequence
GIPGAPGLMGA

SEQ ID NO: 453 - protein, 12 aa, Artificial Sequence
  Synthetic sequence
GIPGAPGLMGAR

SEQ ID NO: 454 - protein, 16 aa, Artificial Sequence
  Synthetic sequence
GIPGAPGLMGARGPPG

SEQ ID NO: 455 - protein, 18 aa, Artificial Sequence
  Synthetic sequence
GIPGAPGLMGARGPPGPA

SEQ ID NO: 456 - protein, 19 aa, Artificial Sequence
  Synthetic sequence
GIPGAPGLMGARGPPGPAG

SEQ ID NO: 457 - protein, 21 aa, Artificial Sequence
  Synthetic sequence
GIPGAPGLMGARGPPGPAGAN

SEQ ID NO: 458 - protein, 27 aa, Artificial Sequence
  Synthetic sequence
GIPGAPGLMGARGPPGPAGANGAPGLR

SEQ ID NO: 459 - protein, 28 aa, Artificial Sequence
  Synthetic sequence
GIPGAPGLMGARGPPGPAGANGAPGLRG

SEQ ID NO: 460 - protein, 36 aa, Artificial Sequence
  Synthetic sequence
GIPGAPGLMGARGPPGPAGANGAPGLRGGAGEPGKN

SEQ ID NO: 461 - protein, 18 aa, Artificial Sequence
  Synthetic sequence
GIPGEKGPAGERGAPGPA

SEQ ID NO: 462 - protein, 19 aa, Artificial Sequence
  Synthetic sequence
GIPGEKGPAGERGAPGPAG

SEQ ID NO: 463 - protein, 21 aa, Artificial Sequence
  Synthetic sequence
GIPGEKGPAGERGAPGPAGPR

SEQ ID NO: 464 - protein, 22 aa, Artificial Sequence
  Synthetic sequence
GIPGEKGPAGERGAPGPAGPRG

SEQ ID NO: 465 - protein, 23 aa, Artificial Sequence
  Synthetic sequence
GIPGEKGPAGERGAPGPAGPRGA

SEQ ID NO: 466 - protein, 24 aa, Artificial Sequence
  Synthetic sequence
GIPGEKGPAGERGAPGPAGPRGAA

SEQ ID NO: 467 - protein, 25 aa, Artificial Sequence
  Synthetic sequence
GIPGEKGPAGERGAPGPAGPRGAAG

SEQ ID NO: 468 - protein, 28 aa, Artificial Sequence
  Synthetic sequence
GIPGEKGPAGERGAPGPAGPRGAAGEPG

SEQ ID NO: 469 - protein, 29 aa, Artificial Sequence
  Synthetic sequence
GIPGEKGPAGERGAPGPAGPRGAAGEPGR

SEQ ID NO: 470 - protein, 30 aa, Artificial Sequence
  Synthetic sequence
GIPGEKGPAGERGAPGPAGPRGAAGEPGRD

SEQ ID NO: 471 - protein, 34 aa, Artificial Sequence
  Synthetic sequence
GIPGEKGPAGERGAPGPAGPRGAAGEPGRDGVPG

SEQ ID NO: 472 - protein, 35 aa, Artificial Sequence
  Synthetic sequence
GIPGEKGPAGERGAPGPAGPRGAAGEPGRDGVPGG

SEQ ID NO: 473 - protein, 37 aa, Artificial Sequence
  Synthetic sequence
GIPGEKGPAGERGAPGPAGPRGAAGEPGRDGVPGGPG

SEQ ID NO: 474 - protein, 39 aa, Artificial Sequence
  Synthetic sequence
GIPGEKGPAGERGAPGPAGPRGAAGEPGRDGVPGGPGMR

SEQ ID NO: 475 - protein, 11 aa, Artificial Sequence
  Synthetic sequence
GIPGFPGMKGH

SEQ ID NO: 476 - protein, 12 aa, Artificial Sequence
  Synthetic sequence
GIPGFPGMKGHR

SEQ ID NO: 477 - protein, 14 aa, Artificial Sequence
  Synthetic sequence
GIPGFPGMKGHRGF

SEQ ID NO: 478 - protein, 15 aa, Artificial Sequence
  Synthetic sequence
GIPGFPGMKGHRGFD

SEQ ID NO: 479 - protein, 17 aa, Artificial Sequence
  Synthetic sequence
GIPGFPGMKGHRGFDGR

SEQ ID NO: 480 - protein, 18 aa, Artificial Sequence
  Synthetic sequence
GIPGFPGMKGHRGFDGRN

SEQ ID NO: 481 - protein, 21 aa, Artificial Sequence
  Synthetic sequence
GIPGFPGMKGHRGFDGRNGEK

SEQ ID NO: 482 - protein, 22 aa, Artificial Sequence
  Synthetic sequence
GIPGFPGMKGHRGFDGRNGEKG

SEQ ID NO: 483 - protein, 30 aa, Artificial Sequence
  Synthetic sequence
GIPGFPGMKGHRGFDGRNGEKGETGAPGLK

SEQ ID NO: 484 - protein, 33 aa, Artificial Sequence
  Synthetic sequence
GIPGFPGMKGHRGFDGRNGEKGETGAPGLKGEN

SEQ ID NO: 485 - protein, 39 aa, Artificial Sequence
  Synthetic sequence
GIPGFPGMKGHRGFDGRNGEKGETGAPGLKGENGLPGEN

SEQ ID NO: 486 - protein, 48 aa, Artificial Sequence
  Synthetic sequence
GIPGFPGMKGHRGFDGRNGEKGETGAPGLKGENGLPGENGAPGPMGPR

SEQ ID NO: 487 - protein, 24 aa, Artificial Sequence
  Synthetic sequence
GKDGESGRPGRPGERGLPGPPGIK

SEQ ID NO: 488 - protein, 27 aa, Artificial Sequence
  Synthetic sequence
GKDGESGRPGRPGERGLPGPPGIKGPA

SEQ ID NO: 489 - protein, 36 aa, Artificial Sequence
  Synthetic sequence
GKDGESGRPGRPGERGLPGPPGIKGPAGIPGFPGMK

SEQ ID NO: 490 - protein, 17 aa, Artificial Sequence
  Synthetic sequence
GKDGSPGEPGANGLPGA

SEQ ID NO: 491 - protein, 25 aa, Artificial Sequence
  Synthetic sequence
GKDGSPGEPGANGLPGAAGERGAPG

SEQ ID NO: 492 - protein, 33 aa, Artificial Sequence
  Synthetic sequence
GKDGSPGEPGANGLPGAAGERGAPGFRGPAGPN

SEQ ID NO: 493 - protein, 17 aa, Artificial Sequence
  Synthetic sequence
GKGEMGPAGIPGAPGLM

SEQ ID NO: 494 - protein, 18 aa, Artificial Sequence
  Synthetic sequence
GKGEMGPAGIPGAPGLMG

SEQ ID NO: 495 - protein, 19 aa, Artificial Sequence
  Synthetic sequence
GKGEMGPAGIPGAPGLMGA

SEQ ID NO: 496 - protein, 20 aa, Artificial Sequence
  Synthetic sequence
GKGEMGPAGIPGAPGLMGAR

SEQ ID NO: 497 - protein, 26 aa, Artificial Sequence
  Synthetic sequence
GKGEMGPAGIPGAPGLMGARGPPGPA

SEQ ID NO: 498 - protein, 29 aa, Artificial Sequence
  Synthetic sequence
GKGEMGPAGIPGAPGLMGARGPPGPAGAN

SEQ ID NO: 499 - protein, 35 aa, Artificial Sequence
  Synthetic sequence
GKGEMGPAGIPGAPGLMGARGPPGPAGANGAPGLR

SEQ ID NO: 500 - protein, 28 aa, Artificial Sequence
  Synthetic sequence
GKPGEPGPKGDAGAPGAPGGKGDAGAPG

SEQ ID NO: 501 - protein, 29 aa, Artificial Sequence
  Synthetic sequence
GKPGEPGPKGDAGAPGAPGGKGDAGAPGE

SEQ ID NO: 502 - protein, 30 aa, Artificial Sequence
  Synthetic sequence
GKPGEPGPKGDAGAPGAPGGKGDAGAPGER

SEQ ID NO: 503 - protein, 31 aa, Artificial Sequence
  Synthetic sequence
GKPGEPGPKGDAGAPGAPGGKGDAGAPGERG

SEQ ID NO: 504 - protein, 33 aa, Artificial Sequence
  Synthetic sequence
GKPGEPGPKGDAGAPGAPGGKGDAGAPGERGPP

SEQ ID NO: 505 - protein, 24 aa, Artificial Sequence
  Synthetic sequence
GKPGPPGSQGESGRPGPPGPSGPR

SEQ ID NO: 506 - protein, 26 aa, Artificial Sequence
  Synthetic sequence
GKPGPPGSQGESGRPGPPGPSGPRGQ

SEQ ID NO: 507 - protein, 30 aa, Artificial Sequence
  Synthetic sequence
GKPGPPGSQGESGRPGPPGPSGPRGQPGVM

SEQ ID NO: 508 - protein, 21 aa, Artificial Sequence
  Synthetic sequence
GLAGYPGPAGPPGPPGPPGTS

SEQ ID NO: 509 - protein, 57 aa, Artificial Sequence
  Synthetic sequence
GLAGYPGPAGPPGPPGPPGTSGHPGSPGSPGYQGPPGEPGQAGPSGPPGPPGAIGPS

SEQ ID NO: 510 - protein, 21 aa, Artificial Sequence
  Synthetic sequence
GLKGENGLPGENGAPGPMGPR

SEQ ID NO: 511 - protein, 21 aa, Artificial Sequence
  Synthetic sequence
GLMGARGPPGPAGANGAPGLR

SEQ ID NO: 512 - protein, 30 aa, Artificial Sequence
  Synthetic sequence
GLPGAAGARGNDGARGSDGQPGPPGPPGTA

SEQ ID NO: 513 - protein, 45 aa, Artificial Sequence
  Synthetic sequence
GLPGAAGARGNDGARGSDGQPGPPGPPGTAGFPGSPGAKGEVGPA

SEQ ID NO: 514 - protein, 14 aa, Artificial Sequence
  Synthetic sequence
GLPGAAGERGAPGF

SEQ ID NO: 515 - protein, 15 aa, Artificial Sequence
  Synthetic sequence
GLPGAAGERGAPGFR

SEQ ID NO: 516 - protein, 16 aa, Artificial Sequence
  Synthetic sequence
GLPGAAGERGAPGFRG

SEQ ID NO: 517 - protein, 19 aa, Artificial Sequence
  Synthetic sequence
GLPGAAGERGAPGFRGPAG

SEQ ID NO: 518 - protein, 21 aa, Artificial Sequence
  Synthetic sequence
GLPGAAGERGAPGFRGPAGPN

SEQ ID NO: 519 - protein, 28 aa, Artificial Sequence
  Synthetic sequence
GLPGAAGERGAPGFRGPAGPNGIPGEKG

SEQ ID NO: 520 - protein, 33 aa, Artificial Sequence
  Synthetic sequence
GLPGAAGERGAPGFRGPAGPNGIPGEKGPAGER

SEQ ID NO: 521 - protein, 37 aa, Artificial Sequence
  Synthetic sequence
GLPGAAGERGAPGFRGPAGPNGIPGEKGPAGERGAPG

SEQ ID NO: 522 - protein, 42 aa, Artificial Sequence
  Synthetic sequence
GLPGAAGERGAPGFRGPAGPNGIPGEKGPAGERGAPGPAGPR

SEQ ID NO: 523 - protein, 12 aa, Artificial Sequence
  Synthetic sequence
GLPGENGAPGPM

SEQ ID NO: 524 - protein, 13 aa, Artificial Sequence
  Synthetic sequence
GLPGENGAPGPMG

SEQ ID NO: 525 - protein, 15 aa, Artificial Sequence
  Synthetic sequence
GLPGENGAPGPMGPR

SEQ ID NO: 526 - protein, 16 aa, Artificial Sequence
  Synthetic sequence
GLPGENGAPGPMGPRG

SEQ ID NO: 527 - protein, 19 aa, Artificial Sequence
  Synthetic sequence
GLPGENGAPGPMGPRGAPG

SEQ ID NO: 528 - protein, 23 aa, Artificial Sequence
  Synthetic sequence
GLPGENGAPGPMGPRGAPGERGR

SEQ ID NO: 529 - protein, 25 aa, Artificial Sequence
  Synthetic sequence
GLPGENGAPGPMGPRGAPGERGRPG

SEQ ID NO: 530 - protein, 33 aa, Artificial Sequence
  Synthetic sequence
GLPGENGAPGPMGPRGAPGERGRPGLPGAAGAR

SEQ ID NO: 531 - protein, 35 aa, Artificial Sequence
  Synthetic sequence
GLPGENGAPGPMGPRGAPGERGRPGLPGAAGARGN

SEQ ID NO: 532 - protein, 40 aa, Artificial Sequence
  Synthetic sequence
GLPGENGAPGPMGPRGAPGERGRPGLPGAAGARGNDGARG

SEQ ID NO: 533 - protein, 44 aa, Artificial Sequence
  Synthetic sequence
GLPGENGAPGPMGPRGAPGERGRPGLPGAAGARGNDGARGSDGQ

SEQ ID NO: 534 - protein, 54 aa, Artificial Sequence
  Synthetic sequence
GLPGENGAPGPMGPRGAPGERGRPGLPGAAGARGNDGARGSDGQPGPPGPPGTA

SEQ ID NO: 535 - protein, 9 aa, Artificial Sequence
  Synthetic sequence
GLPGPPGIK

SEQ ID NO: 536 - protein, 10 aa, Artificial Sequence
  Synthetic sequence
GLPGPPGIKG

SEQ ID NO: 537 - protein, 11 aa, Artificial Sequence
  Synthetic sequence
GLPGPPGIKGP

SEQ ID NO: 538 - protein, 12 aa, Artificial Sequence
  Synthetic sequence
GLPGPPGIKGPA

SEQ ID NO: 539 - protein, 13 aa, Artificial Sequence
  Synthetic sequence
GLPGPPGIKGPAG

SEQ ID NO: 540 - protein, 15 aa, Artificial Sequence
  Synthetic sequence
GLPGPPGIKGPAGIP

SEQ ID NO: 541 - protein, 16 aa, Artificial Sequence
  Synthetic sequence
GLPGPPGIKGPAGIPG

SEQ ID NO: 542 - protein, 17 aa, Artificial Sequence
  Synthetic sequence
GLPGPPGIKGPAGIPGF

SEQ ID NO: 543 - protein, 20 aa, Artificial Sequence
  Synthetic sequence
GLPGPPGIKGPAGIPGFPGM

SEQ ID NO: 544 - protein, 21 aa, Artificial Sequence
  Synthetic sequence
GLPGPPGIKGPAGIPGFPGMK

SEQ ID NO: 545 - protein, 22 aa, Artificial Sequence
  Synthetic sequence
GLPGPPGIKGPAGIPGFPGMKG

SEQ ID NO: 546 - protein, 23 aa, Artificial Sequence
  Synthetic sequence
GLPGPPGIKGPAGIPGFPGMKGH

SEQ ID NO: 547 - protein, 24 aa, Artificial Sequence
  Synthetic sequence
GLPGPPGIKGPAGIPGFPGMKGHR

SEQ ID NO: 548 - protein, 26 aa, Artificial Sequence
  Synthetic sequence
GLPGPPGIKGPAGIPGFPGMKGHRGF

SEQ ID NO: 549 - protein, 12 aa, Artificial Sequence
  Synthetic sequence
GLPGTGGPPGEN

SEQ ID NO: 550 - protein, 30 aa, Artificial Sequence
  Synthetic sequence
GLRGGAGEPGKNGAKGEPGPRGERGEAGIP

SEQ ID NO: 551 - protein, 19 aa, Artificial Sequence
  Synthetic sequence
GMPGSPGGPGSDGKPGPPG

SEQ ID NO: 552 - protein, 21 aa, Artificial Sequence
  Synthetic sequence
GMPGSPGGPGSDGKPGPPGSQ

SEQ ID NO: 553 - protein, 22 aa, Artificial Sequence
  Synthetic sequence
GMPGSPGGPGSDGKPGPPGSQG

SEQ ID NO: 554 - protein, 36 aa, Artificial Sequence
  Synthetic sequence
GMPGSPGGPGSDGKPGPPGSQGESGRPGPPGPSGPR

SEQ ID NO: 555 - protein, 42 aa, Artificial Sequence
  Synthetic sequence
GMPGSPGGPGSDGKPGPPGSQGESGRPGPPGPSGPRGQPGVM

SEQ ID NO: 556 - protein, 45 aa, Artificial Sequence
  Synthetic sequence
GMRGMPGSPGGPGSDGKPGPPGSQGESGRPGPPGPSGPRGQPGVM

SEQ ID NO: 557 - protein, 27 aa, Artificial Sequence
  Synthetic sequence
GNDGAPGKNGERGGPGGPGPQGPPGKN

SEQ ID NO: 558 - protein, 34 aa, Artificial Sequence
  Synthetic sequence
GNDGAPGKNGERGGPGGPGPQGPPGKNGETGPQG

SEQ ID NO: 559 - protein, 38 aa, Artificial Sequence
  Synthetic sequence
GNDGAPGKNGERGGPGGPGPQGPPGKNGETGPQGPPGP

SEQ ID NO: 560 - protein, 21 aa, Artificial Sequence
  Synthetic sequence
GNDGARGSDGQPGPPGPPGTA

SEQ ID NO: 561 - protein, 22 aa, Artificial Sequence
  Synthetic sequence
GNDGARGSDGQPGPPGPPGTAG

SEQ ID NO: 562 - protein, 23 aa, Artificial Sequence
  Synthetic sequence
GNDGARGSDGQPGPPGPPGTAGF

SEQ ID NO: 563 - protein, 25 aa, Artificial Sequence
  Synthetic sequence
GNDGARGSDGQPGPPGPPGTAGFPG

SEQ ID NO: 564 - protein, 26 aa, Artificial Sequence
  Synthetic sequence
GNDGARGSDGQPGPPGPPGTAGFPGS

SEQ ID NO: 565 - protein, 30 aa, Artificial Sequence
  Synthetic sequence
GNDGARGSDGQPGPPGPPGTAGFPGSPGAK

SEQ ID NO: 566 - protein, 31 aa, Artificial Sequence
  Synthetic sequence
GNDGARGSDGQPGPPGPPGTAGFPGSPGAKG

SEQ ID NO: 567 - protein, 34 aa, Artificial Sequence
  Synthetic sequence
GNDGARGSDGQPGPPGPPGTAGFPGSPGAKGEVG

SEQ ID NO: 568 - protein, 36 aa, Artificial Sequence
  Synthetic sequence
GNDGARGSDGQPGPPGPPGTAGFPGSPGAKGEVGPA

SEQ ID NO: 569 - protein, 37 aa, Artificial Sequence
  Synthetic sequence
GNDGARGSDGQPGPPGPPGTAGFPGSPGAKGEVGPAG

SEQ ID NO: 570 - protein, 38 aa, Artificial Sequence
  Synthetic sequence
GNDGARGSDGQPGPPGPPGTAGFPGSPGAKGEVGPAGS

SEQ ID NO: 571 - protein, 40 aa, Artificial Sequence
  Synthetic sequence
GNDGARGSDGQPGPPGPPGTAGFPGSPGAKGEVGPAGSPG

SEQ ID NO: 572 - protein, 42 aa, Artificial Sequence
  Synthetic sequence
GNDGARGSDGQPGPPGPPGTAGFPGSPGAKGEVGPAGSPGSN

SEQ ID NO: 573 - protein, 48 aa, Artificial Sequence
  Synthetic sequence
GNDGARGSDGQPGPPGPPGTAGFPGSPGAKGEVGPAGSPGSNGAPGQR

SEQ ID NO: 574 - protein, 50 aa, Artificial Sequence
  Synthetic sequence
GNDGARGSDGQPGPPGPPGTAGFPGSPGAKGEVGPAGSPGSNGAPGQRGE

SEQ ID NO: 575 - protein, 54 aa, Artificial Sequence
  Synthetic sequence
GNDGARGSDGQPGPPGPPGTAGFPGSPGAKGEVGPAGSPGSNGAPGQRGEPGPQ

SEQ ID NO: 576 - protein, 55 aa, Artificial Sequence
  Synthetic sequence
GNDGARGSDGQPGPPGPPGTAGFPGSPGAKGEVGPAGSPGSNGAPGQRGEPGPQG

SEQ ID NO: 577 - protein, 19 aa, Artificial Sequence
  Synthetic sequence
GPAGANGAPGLRGGAGEPG

SEQ ID NO: 578 - protein, 12 aa, Artificial Sequence
  Synthetic sequence
GPAGIPGAPGLM

SEQ ID NO: 579 - protein, 13 aa, Artificial Sequence
  Synthetic sequence
GPAGIPGAPGLMG

SEQ ID NO: 580 - protein, 14 aa, Artificial Sequence
  Synthetic sequence
GPAGIPGAPGLMGA

SEQ ID NO: 581 - protein, 15 aa, Artificial Sequence
  Synthetic sequence
GPAGIPGAPGLMGAR

SEQ ID NO: 582 - protein, 30 aa, Artificial Sequence
  Synthetic sequence
GPAGIPGAPGLMGARGPPGPAGANGAPGLR

SEQ ID NO: 583 - protein, 9 aa, Artificial Sequence
  Synthetic sequence
GPAGIPGFP

SEQ ID NO: 584 - protein, 10 aa, Artificial Sequence
  Synthetic sequence
GPAGIPGFPG

SEQ ID NO: 585 - protein, 11 aa, Artificial Sequence
  Synthetic sequence
GPAGIPGFPGM

SEQ ID NO: 586 - protein, 12 aa, Artificial Sequence
  Synthetic sequence
GPAGIPGFPGMK

SEQ ID NO: 587 - protein, 13 aa, Artificial Sequence
  Synthetic sequence
GPAGIPGFPGMKG

SEQ ID NO: 588 - protein, 14 aa, Artificial Sequence
  Synthetic sequence
GPAGIPGFPGMKGH

SEQ ID NO: 589 - protein, 15 aa, Artificial Sequence
  Synthetic sequence
GPAGIPGFPGMKGHR

SEQ ID NO: 590 - protein, 16 aa, Artificial Sequence
  Synthetic sequence
GPAGIPGFPGMKGHRG

SEQ ID NO: 591 - protein, 17 aa, Artificial Sequence
  Synthetic sequence
GPAGIPGFPGMKGHRGF

SEQ ID NO: 592 - protein, 18 aa, Artificial Sequence
  Synthetic sequence
GPAGIPGFPGMKGHRGFD

SEQ ID NO: 593 - protein, 19 aa, Artificial Sequence
  Synthetic sequence
GPAGIPGFPGMKGHRGFDG

SEQ ID NO: 594 - protein, 20 aa, Artificial Sequence
  Synthetic sequence
GPAGIPGFPGMKGHRGFDGR

SEQ ID NO: 595 - protein, 21 aa, Artificial Sequence
  Synthetic sequence
GPAGIPGFPGMKGHRGFDGRN

SEQ ID NO: 596 - protein, 22 aa, Artificial Sequence
  Synthetic sequence
GPAGIPGFPGMKGHRGFDGRNG

SEQ ID NO: 597 - protein, 23 aa, Artificial Sequence
  Synthetic sequence
GPAGIPGFPGMKGHRGFDGRNGE

SEQ ID NO: 598 - protein, 24 aa, Artificial Sequence
  Synthetic sequence
GPAGIPGFPGMKGHRGFDGRNGEK

SEQ ID NO: 599 - protein, 25 aa, Artificial Sequence
  Synthetic sequence
GPAGIPGFPGMKGHRGFDGRNGEKG

SEQ ID NO: 600 - protein, 26 aa, Artificial Sequence
  Synthetic sequence
GPAGIPGFPGMKGHRGFDGRNGEKGE

SEQ ID NO: 601 - protein, 27 aa, Artificial Sequence
  Synthetic sequence
GPAGIPGFPGMKGHRGFDGRNGEKGET

SEQ ID NO: 602 - protein, 28 aa, Artificial Sequence
  Synthetic sequence
GPAGIPGFPGMKGHRGFDGRNGEKGETG

SEQ ID NO: 603 - protein, 29 aa, Artificial Sequence
  Synthetic sequence
GPAGIPGFPGMKGHRGFDGRNGEKGETGA

SEQ ID NO: 604 - protein, 30 aa, Artificial Sequence
  Synthetic sequence
GPAGIPGFPGMKGHRGFDGRNGEKGETGAP

SEQ ID NO: 605 - protein, 31 aa, Artificial Sequence
  Synthetic sequence
GPAGIPGFPGMKGHRGFDGRNGEKGETGAPG

SEQ ID NO: 606 - protein, 32 aa, Artificial Sequence
  Synthetic sequence
GPAGIPGFPGMKGHRGFDGRNGEKGETGAPGL

SEQ ID NO: 607 - protein, 33 aa, Artificial Sequence
  Synthetic sequence
GPAGIPGFPGMKGHRGFDGRNGEKGETGAPGLK

SEQ ID NO: 608 - protein, 34 aa, Artificial Sequence
  Synthetic sequence
GPAGIPGFPGMKGHRGFDGRNGEKGETGAPGLKG

SEQ ID NO: 609 - protein, 36 aa, Artificial Sequence
  Synthetic sequence
GPAGIPGFPGMKGHRGFDGRNGEKGETGAPGLKGEN

SEQ ID NO: 610 - protein, 40 aa, Artificial Sequence
  Synthetic sequence
GPAGIPGFPGMKGHRGFDGRNGEKGETGAPGLKGENGLPG

SEQ ID NO: 611 - protein, 42 aa, Artificial Sequence
  Synthetic sequence
GPAGIPGFPGMKGHRGFDGRNGEKGETGAPGLKGENGLPGEN

SEQ ID NO: 612 - protein, 48 aa, Artificial Sequence
  Synthetic sequence
GPAGIPGFPGMKGHRGFDGRNGEKGETGAPGLKGENGLPGENGAPGPM

SEQ ID NO: 613 - protein, 51 aa, Artificial Sequence
  Synthetic sequence
GPAGIPGFPGMKGHRGFDGRNGEKGETGAPGLKGENGLPGENGAPGPMGPR

SEQ ID NO: 614 - protein, 24 aa, Artificial Sequence
  Synthetic sequence
GPAGKDGESGRPGRPGERGLPGPP

SEQ ID NO: 615 - protein, 25 aa, Artificial Sequence
  Synthetic sequence
GPAGKDGESGRPGRPGERGLPGPPG

SEQ ID NO: 616 - protein, 27 aa, Artificial Sequence
  Synthetic sequence
GPAGKDGESGRPGRPGERGLPGPPGIK

SEQ ID NO: 617 - protein, 30 aa, Artificial Sequence
  Synthetic sequence
GPAGKDGESGRPGRPGERGLPGPPGIKGPA

SEQ ID NO: 618 - protein, 39 aa, Artificial Sequence
  Synthetic sequence
GPAGKDGESGRPGRPGERGLPGPPGIKGPAGIPGFPGMK

SEQ ID NO: 619 - protein, 27 aa, Artificial Sequence
  Synthetic sequence
GPAGPNGIPGEKGPAGERGAPGPAGPR

SEQ ID NO: 620 - protein, 12 aa, Artificial Sequence
  Synthetic sequence
GPAGPPGPPGPP

SEQ ID NO: 621 - protein, 24 aa, Artificial Sequence
  Synthetic sequence
GPGMRGMPGSPGGPGSDGKPGPPG

SEQ ID NO: 622 - protein, 47 aa, Artificial Sequence
  Synthetic sequence
GPGMRGMPGSPGGPGSDGKPGPPGSQGESGRPGPPGPSGPRGQPGVM

SEQ ID NO: 623 - protein, 24 aa, Artificial Sequence
  Synthetic sequence
GPGSDGKPGPPGSQGESGRPGPPG

SEQ ID NO: 624 - protein, 27 aa, Artificial Sequence
  Synthetic sequence
GPGSDGKPGPPGSQGESGRPGPPGPSG

SEQ ID NO: 625 - protein, 29 aa, Artificial Sequence
  Synthetic sequence
GPGSDGKPGPPGSQGESGRPGPPGPSGPR

SEQ ID NO: 626 - protein, 35 aa, Artificial Sequence
  Synthetic sequence
GPGSDGKPGPPGSQGESGRPGPPGPSGPRGQPGVM

SEQ ID NO: 627 - protein, 43 aa, Artificial Sequence
  Synthetic sequence
GPGSDGKPGPPGSQGESGRPGPPGPSGPRGQPGVMGFPGPKGN

SEQ ID NO: 628 - protein, 21 aa, Artificial Sequence
  Synthetic sequence
GPMGPRGAPGERGRPGLPGAA

SEQ ID NO: 629 - protein, 24 aa, Artificial Sequence
  Synthetic sequence
GPMGPRGAPGERGRPGLPGAAGAR

SEQ ID NO: 630 - protein, 21 aa, Artificial Sequence
  Synthetic sequence
GPNGIPGEKGPAGERGAPGPA

SEQ ID NO: 631 - protein, 27 aa, Artificial Sequence
  Synthetic sequence
GPPGAIGPSGPAGKDGESGRPGRPGER

SEQ ID NO: 632 - protein, 36 aa, Artificial Sequence
  Synthetic sequence
GPPGAIGPSGPAGKDGESGRPGRPGERGLPGPPGIK

SEQ ID NO: 633 - protein, 19 aa, Artificial Sequence
  Synthetic sequence
GPPGEPGQAGPSGPPGPPG

SEQ ID NO: 634 - protein, 24 aa, Artificial Sequence
  Synthetic sequence
GPPGEPGQAGPSGPPGPPGAIGPS

SEQ ID NO: 635 - protein, 30 aa, Artificial Sequence
  Synthetic sequence
GPPGEPGQAGPSGPPGPPGAIGPSGPAGKD

SEQ ID NO: 636 - protein, 51 aa, Artificial Sequence
  Synthetic sequence
GPPGEPGQAGPSGPPGPPGAIGPSGPAGKDGESGRPGRPGERGLPGPPGIK

SEQ ID NO: 637 - protein, 18 aa, Artificial Sequence
  Synthetic sequence
GPPGIKGPAGIPGFPGMK

SEQ ID NO: 638 - protein, 27 aa, Artificial Sequence
  Synthetic sequence
GPPGINGSPGGKGEMGPAGIPGAPGLM

SEQ ID NO: 639 - protein, 15 aa, Artificial Sequence
  Synthetic sequence
GPPGPAGANGAPGLR

SEQ ID NO: 640 - protein, 16 aa, Artificial Sequence
  Synthetic sequence
GPPGPAGANGAPGLRG

SEQ ID NO: 641 - protein, 17 aa, Artificial Sequence
  Synthetic sequence
GPPGPAGANGAPGLRGG

SEQ ID NO: 642 - protein, 18 aa, Artificial Sequence
  Synthetic sequence
GPPGPAGANGAPGLRGGA

SEQ ID NO: 643 - protein, 19 aa, Artificial Sequence
  Synthetic sequence
GPPGPAGANGAPGLRGGAG

SEQ ID NO: 644 - protein, 20 aa, Artificial Sequence
  Synthetic sequence
GPPGPAGANGAPGLRGGAGE

SEQ ID NO: 645 - protein, 21 aa, Artificial Sequence
  Synthetic sequence
GPPGPAGANGAPGLRGGAGEP

SEQ ID NO: 646 - protein, 22 aa, Artificial Sequence
  Synthetic sequence
GPPGPAGANGAPGLRGGAGEPG

SEQ ID NO: 647 - protein, 23 aa, Artificial Sequence
  Synthetic sequence
GPPGPAGANGAPGLRGGAGEPGK

SEQ ID NO: 648 - protein, 24 aa, Artificial Sequence
  Synthetic sequence
GPPGPAGANGAPGLRGGAGEPGKN

SEQ ID NO: 649 - protein, 25 aa, Artificial Sequence
  Synthetic sequence
GPPGPAGANGAPGLRGGAGEPGKNG

SEQ ID NO: 650 - protein, 26 aa, Artificial Sequence
  Synthetic sequence
GPPGPAGANGAPGLRGGAGEPGKNGA

SEQ ID NO: 651 - protein, 27 aa, Artificial Sequence
  Synthetic sequence
GPPGPAGANGAPGLRGGAGEPGKNGAK

SEQ ID NO: 652 - protein, 28 aa, Artificial Sequence
  Synthetic sequence
GPPGPAGANGAPGLRGGAGEPGKNGAKG

SEQ ID NO: 653 - protein, 29 aa, Artificial Sequence
  Synthetic sequence
GPPGPAGANGAPGLRGGAGEPGKNGAKGE

SEQ ID NO: 654 - protein, 31 aa, Artificial Sequence
  Synthetic sequence
GPPGPAGANGAPGLRGGAGEPGKNGAKGEPG

SEQ ID NO: 655 - protein, 33 aa, Artificial Sequence
  Synthetic sequence
GPPGPAGANGAPGLRGGAGEPGKNGAKGEPGPR

SEQ ID NO: 656 - protein, 34 aa, Artificial Sequence
  Synthetic sequence
GPPGPAGANGAPGLRGGAGEPGKNGAKGEPGPRG

SEQ ID NO: 657 - protein, 35 aa, Artificial Sequence
  Synthetic sequence
GPPGPAGANGAPGLRGGAGEPGKNGAKGEPGPRGE

SEQ ID NO: 658 - protein, 36 aa, Artificial Sequence
  Synthetic sequence
GPPGPAGANGAPGLRGGAGEPGKNGAKGEPGPRGER

SEQ ID NO: 659 - protein, 37 aa, Artificial Sequence
  Synthetic sequence
GPPGPAGANGAPGLRGGAGEPGKNGAKGEPGPRGERG

SEQ ID NO: 660 - protein, 38 aa, Artificial Sequence
  Synthetic sequence
GPPGPAGANGAPGLRGGAGEPGKNGAKGEPGPRGERGE

SEQ ID NO: 661 - protein, 39 aa, Artificial Sequence
  Synthetic sequence
GPPGPAGANGAPGLRGGAGEPGKNGAKGEPGPRGERGEA

SEQ ID NO: 662 - protein, 12 aa, Artificial Sequence
  Synthetic sequence
GPPGPPGAIGPS

SEQ ID NO: 663 - protein, 15 aa, Artificial Sequence
  Synthetic sequence
GPPGPPGAIGPSGPA

SEQ ID NO: 664 - protein, 30 aa, Artificial Sequence
  Synthetic sequence
GPPGPPGAIGPSGPAGKDGESGRPGRPGER

SEQ ID NO: 665 - protein, 39 aa, Artificial Sequence
  Synthetic sequence
GPPGPPGAIGPSGPAGKDGESGRPGRPGERGLPGPPGIK

SEQ ID NO: 666 - protein, 21 aa, Artificial Sequence
  Synthetic sequence
GPPGPPGINGSPGGKGEMGPA

SEQ ID NO: 667 - protein, 30 aa, Artificial Sequence
  Synthetic sequence
GPPGPPGINGSPGGKGEMGPAGIPGAPGLM

SEQ ID NO: 668 - protein, 32 aa, Artificial Sequence
  Synthetic sequence
GPPGPPGINGSPGGKGEMGPAGIPGAPGLMGA

SEQ ID NO: 669 - protein, 33 aa, Artificial Sequence
  Synthetic sequence
GPPGPPGINGSPGGKGEMGPAGIPGAPGLMGAR

SEQ ID NO: 670 - protein, 48 aa, Artificial Sequence
  Synthetic sequence
GPPGPPGINGSPGGKGEMGPAGIPGAPGLMGARGPPGPAGANGAPGLR

SEQ ID NO: 671 - protein, 12 aa, Artificial Sequence
  Synthetic sequence
GPPGPPGPPGTS

SEQ ID NO: 672 - protein, 16 aa, Artificial Sequence
  Synthetic sequence
GPPGPPGPPGTSGHPG

SEQ ID NO: 673 - protein, 48 aa, Artificial Sequence
  Synthetic sequence
GPPGPPGPPGTSGHPGSPGSPGYQGPPGEPGQAGPSGPPGPPGAIGPS

SEQ ID NO: 674 - protein, 18 aa, Artificial Sequence
  Synthetic sequence
GPPGPPGTAGFPGSPGAK

SEQ ID NO: 675 - protein, 24 aa, Artificial Sequence
  Synthetic sequence
GPPGPPGTAGFPGSPGAKGEVGPA

SEQ ID NO: 676 - protein, 15 aa, Artificial Sequence
  Synthetic sequence
GPPGPSGPRGQPGVM

SEQ ID NO: 677 - protein, 30 aa, Artificial Sequence
  Synthetic sequence
GPPGPSGPRGQPGVMGFPGPKGNDGAPGKN

SEQ ID NO: 678 - protein, 27 aa, Artificial Sequence
  Synthetic sequence
GPPGSQGESGRPGPPGPSGPRGQPGVM

SEQ ID NO: 679 - protein, 21 aa, Artificial Sequence
  Synthetic sequence
GPPGTAGFPGSPGAKGEVGPA

SEQ ID NO: 680 - protein, 18 aa, Artificial Sequence
  Synthetic sequence
GPQGHAGAQGPPGPPGIN

SEQ ID NO: 681 - protein, 25 aa, Artificial Sequence
  Synthetic sequence
GPRGAAGEPGRDGVPGGPGMRGMPG

SEQ ID NO: 682 - protein, 18 aa, Artificial Sequence
  Synthetic sequence
GPRGAPGERGRPGLPGAA

SEQ ID NO: 683 - protein, 20 aa, Artificial Sequence
  Synthetic sequence
GPRGAPGERGRPGLPGAAGA

SEQ ID NO: 684 - protein, 21 aa, Artificial Sequence
  Synthetic sequence
GPRGAPGERGRPGLPGAAGAR

SEQ ID NO: 685 - protein, 23 aa, Artificial Sequence
  Synthetic sequence
GPRGAPGERGRPGLPGAAGARGN

SEQ ID NO: 686 - protein, 28 aa, Artificial Sequence
  Synthetic sequence
GPRGAPGERGRPGLPGAAGARGNDGARG

SEQ ID NO: 687 - protein, 42 aa, Artificial Sequence
  Synthetic sequence
GPRGAPGERGRPGLPGAAGARGNDGARGSDGQPGPPGPPGTA

SEQ ID NO: 688 - protein, 17 aa, Artificial Sequence
  Synthetic sequence
GPRGQPGVMGFPGPKGN

SEQ ID NO: 689 - protein, 24 aa, Artificial Sequence
  Synthetic sequence
GPRGQPGVMGFPGPKGNDGAPGKN

SEQ ID NO: 690 - protein, 30 aa, Artificial Sequence
  Synthetic sequence
GPSGPAGKDGESGRPGRPGERGLPGPPGIK

SEQ ID NO: 691 - protein, 33 aa, Artificial Sequence
  Synthetic sequence
GPSGPAGKDGESGRPGRPGERGLPGPPGIKGPA

SEQ ID NO: 692 - protein, 15 aa, Artificial Sequence
  Synthetic sequence
GPSGPPGPPGAIGPS

SEQ ID NO: 693 - protein, 27 aa, Artificial Sequence
  Synthetic sequence
GPSGPRGQPGVMGFPGPKGNDGAPGKN

SEQ ID NO: 694 - protein, 18 aa, Artificial Sequence
  Synthetic sequence
GQAGPSGPPGPPGAIGPS

SEQ ID NO: 695 - protein, 12 aa, Artificial Sequence
  Synthetic sequence
GQPGPPGPPGTA

SEQ ID NO: 696 - protein, 21 aa, Artificial Sequence
  Synthetic sequence
GQPGPPGPPGTAGFPGSPGAK

SEQ ID NO: 697 - protein, 27 aa, Artificial Sequence
  Synthetic sequence
GQPGPPGPPGTAGFPGSPGAKGEVGPA

SEQ ID NO: 698 - protein, 12 aa, Artificial Sequence
  Synthetic sequence
GQPGVMGFPGPK

SEQ ID NO: 699 - protein, 14 aa, Artificial Sequence
  Synthetic sequence
GQPGVMGFPGPKGN

SEQ ID NO: 700 - protein, 21 aa, Artificial Sequence
  Synthetic sequence
GQPGVMGFPGPKGNDGAPGKN

SEQ ID NO: 701 - protein, 24 aa, Artificial Sequence
  Synthetic sequence
GQRGEPGPQGHAGAQGPPGPPGIN

SEQ ID NO: 702 - protein, 22 aa, Artificial Sequence
  Synthetic sequence
GRDGVPGGPGMRGMPGSPGGPG

SEQ ID NO: 703 - protein, 54 aa, Artificial Sequence
  Synthetic sequence
GRDGVPGGPGMRGMPGSPGGPGSDGKPGPPGSQGESGRPGPPGPSGPRGQPGVM

SEQ ID NO: 704 - protein, 24 aa, Artificial Sequence
  Synthetic sequence
GRNGEKGETGAPGLKGENGLPGEN

SEQ ID NO: 705 - protein, 33 aa, Artificial Sequence
  Synthetic sequence
GRNGEKGETGAPGLKGENGLPGENGAPGPMGPR

SEQ ID NO: 706 - protein, 15 aa, Artificial Sequence
  Synthetic sequence
GRPGERGLPGPPGIK

SEQ ID NO: 707 - protein, 18 aa, Artificial Sequence
  Synthetic sequence
GRPGERGLPGPPGIKGPA

SEQ ID NO: 708 - protein, 12 aa, Artificial Sequence
  Synthetic sequence
GRPGLPGAAGAR

SEQ ID NO: 709 - protein, 33 aa, Artificial Sequence
  Synthetic sequence
GRPGLPGAAGARGNDGARGSDGQPGPPGPPGTA

SEQ ID NO: 710 - protein, 42 aa, Artificial Sequence
  Synthetic sequence
GRPGLPGAAGARGNDGARGSDGQPGPPGPPGTAGFPGSPGAK

SEQ ID NO: 711 - protein, 48 aa, Artificial Sequence
  Synthetic sequence
GRPGLPGAAGARGNDGARGSDGQPGPPGPPGTAGFPGSPGAKGEVGPA

SEQ ID NO: 712 - protein, 18 aa, Artificial Sequence
  Synthetic sequence
GRPGPPGPSGPRGQPGVM

SEQ ID NO: 713 - protein, 18 aa, Artificial Sequence
  Synthetic sequence
GRPGRPGERGLPGPPGIK

SEQ ID NO: 714 - protein, 21 aa, Artificial Sequence
  Synthetic sequence
GRPGRPGERGLPGPPGIKGPA

SEQ ID NO: 715 - protein, 33 aa, Artificial Sequence
  Synthetic sequence
GSDGKPGPPGSQGESGRPGPPGPSGPRGQPGVM

SEQ ID NO: 716 - protein, 15 aa, Artificial Sequence
  Synthetic sequence
GSDGQPGPPGPPGTA

SEQ ID NO: 717 - protein, 24 aa, Artificial Sequence
  Synthetic sequence
GSDGQPGPPGPPGTAGFPGSPGAK

SEQ ID NO: 718 - protein, 30 aa, Artificial Sequence
  Synthetic sequence
GSDGQPGPPGPPGTAGFPGSPGAKGEVGPA

SEQ ID NO: 719 - protein, 30 aa, Artificial Sequence
  Synthetic sequence
GSNGAPGQRGEPGPQGHAGAQGPPGPPGIN

SEQ ID NO: 720 - protein, 30 aa, Artificial Sequence
  Synthetic sequence
GSPGEPGANGLPGAAGERGAPGFRGPAGPN

SEQ ID NO: 721 - protein, 19 aa, Artificial Sequence
  Synthetic sequence
GSPGGKGEMGPAGIPGAPG

SEQ ID NO: 722 - protein, 21 aa, Artificial Sequence
  Synthetic sequence
GSPGGKGEMGPAGIPGAPGLM

SEQ ID NO: 723 - protein, 22 aa, Artificial Sequence
  Synthetic sequence
GSPGGKGEMGPAGIPGAPGLMG

SEQ ID NO: 724 - protein, 23 aa, Artificial Sequence
  Synthetic sequence
GSPGGKGEMGPAGIPGAPGLMGA

SEQ ID NO: 725 - protein, 24 aa, Artificial Sequence
  Synthetic sequence
GSPGGKGEMGPAGIPGAPGLMGAR

SEQ ID NO: 726 - protein, 25 aa, Artificial Sequence
  Synthetic sequence
GSPGGKGEMGPAGIPGAPGLMGARG

SEQ ID NO: 727 - protein, 28 aa, Artificial Sequence
  Synthetic sequence
GSPGGKGEMGPAGIPGAPGLMGARGPPG

SEQ ID NO: 728 - protein, 30 aa, Artificial Sequence
  Synthetic sequence
GSPGGKGEMGPAGIPGAPGLMGARGPPGPA

SEQ ID NO: 729 - protein, 31 aa, Artificial Sequence
  Synthetic sequence
GSPGGKGEMGPAGIPGAPGLMGARGPPGPAG

SEQ ID NO: 730 - protein, 33 aa, Artificial Sequence
  Synthetic sequence
GSPGGKGEMGPAGIPGAPGLMGARGPPGPAGAN

SEQ ID NO: 731 - protein, 39 aa, Artificial Sequence
  Synthetic sequence
GSPGGKGEMGPAGIPGAPGLMGARGPPGPAGANGAPGLR

SEQ ID NO: 732 - protein, 48 aa, Artificial Sequence
  Synthetic sequence
GSPGGKGEMGPAGIPGAPGLMGARGPPGPAGANGAPGLRGGAGEPGKN

SEQ ID NO: 733 - protein, 39 aa, Artificial Sequence
  Synthetic sequence
GSPGGPGSDGKPGPPGSQGESGRPGPPGPSGPRGQPGVM

SEQ ID NO: 734 - protein, 18 aa, Artificial Sequence
  Synthetic sequence
GSPGSNGAPGQRGEPGPQ

SEQ ID NO: 735 - protein, 24 aa, Artificial Sequence
  Synthetic sequence
GSPGSNGAPGQRGEPGPQGHAGAQ

SEQ ID NO: 736 - protein, 26 aa, Artificial Sequence
  Synthetic sequence
GSPGSNGAPGQRGEPGPQGHAGAQGP

SEQ ID NO: 737 - protein, 27 aa, Artificial Sequence
  Synthetic sequence
GSPGSNGAPGQRGEPGPQGHAGAQGPP

SEQ ID NO: 738 - protein, 28 aa, Artificial Sequence
  Synthetic sequence
GSPGSNGAPGQRGEPGPQGHAGAQGPPG

SEQ ID NO: 739 - protein, 29 aa, Artificial Sequence
  Synthetic sequence
GSPGSNGAPGQRGEPGPQGHAGAQGPPGP

SEQ ID NO: 740 - protein, 30 aa, Artificial Sequence
  Synthetic sequence
GSPGSNGAPGQRGEPGPQGHAGAQGPPGPP

SEQ ID NO: 741 - protein, 31 aa, Artificial Sequence
  Synthetic sequence
GSPGSNGAPGQRGEPGPQGHAGAQGPPGPPG

SEQ ID NO: 742 - protein, 33 aa, Artificial Sequence
  Synthetic sequence
GSPGSNGAPGQRGEPGPQGHAGAQGPPGPPGIN

SEQ ID NO: 743 - protein, 34 aa, Artificial Sequence
  Synthetic sequence
GSPGSNGAPGQRGEPGPQGHAGAQGPPGPPGING

SEQ ID NO: 744 - protein, 35 aa, Artificial Sequence
  Synthetic sequence
GSPGSNGAPGQRGEPGPQGHAGAQGPPGPPGINGS

SEQ ID NO: 745 - protein, 37 aa, Artificial Sequence
  Synthetic sequence
GSPGSNGAPGQRGEPGPQGHAGAQGPPGPPGINGSPG

SEQ ID NO: 746 - protein, 38 aa, Artificial Sequence
  Synthetic sequence
GSPGSNGAPGQRGEPGPQGHAGAQGPPGPPGINGSPGG

SEQ ID NO: 747 - protein, 39 aa, Artificial Sequence
  Synthetic sequence
GSPGSNGAPGQRGEPGPQGHAGAQGPPGPPGINGSPGGK

SEQ ID NO: 748 - protein, 40 aa, Artificial Sequence
  Synthetic sequence
GSPGSNGAPGQRGEPGPQGHAGAQGPPGPPGINGSPGGKG

SEQ ID NO: 749 - protein, 42 aa, Artificial Sequence
  Synthetic sequence
GSPGSNGAPGQRGEPGPQGHAGAQGPPGPPGINGSPGGKGEM

SEQ ID NO: 750 - protein, 43 aa, Artificial Sequence
  Synthetic sequence
GSPGSNGAPGQRGEPGPQGHAGAQGPPGPPGINGSPGGKGEMG

SEQ ID NO: 751 - protein, 45 aa, Artificial Sequence
  Synthetic sequence
GSPGSNGAPGQRGEPGPQGHAGAQGPPGPPGINGSPGGKGEMGPA

SEQ ID NO: 752 - protein, 54 aa, Artificial Sequence
  Synthetic sequence
GSPGSNGAPGQRGEPGPQGHAGAQGPPGPPGINGSPGGKGEMGPAGIPGAPGLM

SEQ ID NO: 753 - protein, 55 aa, Artificial Sequence
  Synthetic sequence
GSPGSNGAPGQRGEPGPQGHAGAQGPPGPPGINGSPGGKGEMGPAGIPGAPGLMG

SEQ ID NO: 754 - protein, 56 aa, Artificial Sequence
  Synthetic sequence
GSPGSNGAPGQRGEPGPQGHAGAQGPPGPPGINGSPGGKGEMGPAGIPGAPGLMGA

SEQ ID NO: 755 - protein, 24 aa, Artificial Sequence
  Synthetic sequence
GSQGESGRPGPPGPSGPRGQPGVM

SEQ ID NO: 756 - protein, 18 aa, Artificial Sequence
  Synthetic sequence
GTAGFPGSPGAKGEVGPA

SEQ ID NO: 757 - protein, 30 aa, Artificial Sequence
  Synthetic sequence
GVPGGPGMRGMPGSPGGPGSDGKPGPPGSQ

SEQ ID NO: 758 - protein, 51 aa, Artificial Sequence
  Synthetic sequence
GVPGGPGMRGMPGSPGGPGSDGKPGPPGSQGESGRPGPPGPSGPRGQPGVM

SEQ ID NO: 759 - protein, 17 aa, Artificial Sequence
  Synthetic sequence
GYPGPAGPPGPPGPPGT

SEQ ID NO: 760 - protein, 18 aa, Artificial Sequence
  Synthetic sequence
GYPGPAGPPGPPGPPGTS

SEQ ID NO: 761 - protein, 20 aa, Artificial Sequence
  Synthetic sequence
GYPGPAGPPGPPGPPGTSGH

SEQ ID NO: 762 - protein, 22 aa, Artificial Sequence
  Synthetic sequence
GYPGPAGPPGPPGPPGTSGHPG

SEQ ID NO: 763 - protein, 54 aa, Artificial Sequence
  Synthetic sequence
GYPGPAGPPGPPGPPGTSGHPGSPGSPGYQGPPGEPGQAGPSGPPGPPGAIGPS

SEQ ID NO: 764 - protein, 14 aa, Artificial Sequence
  Synthetic sequence
HAGAQGPPGPPGIN

SEQ ID NO: 765 - protein, 18 aa, Artificial Sequence
  Synthetic sequence
HAGAQGPPGPPGINGSPG

SEQ ID NO: 766 - protein, 24 aa, Artificial Sequence
  Synthetic sequence
HAGAQGPPGPPGINGSPGGKGEMG

SEQ ID NO: 767 - protein, 26 aa, Artificial Sequence
  Synthetic sequence
HAGAQGPPGPPGINGSPGGKGEMGPA

SEQ ID NO: 768 - protein, 38 aa, Artificial Sequence
  Synthetic sequence
HAGAQGPPGPPGINGSPGGKGEMGPAGIPGAPGLMGAR

SEQ ID NO: 769 - protein, 35 aa, Artificial Sequence
  Synthetic sequence
HPGSPGSPGYQGPPGEPGQAGPSGPPGPPGAIGPS

SEQ ID NO: 770 - protein, 23 aa, Artificial Sequence
  Synthetic sequence
HRGFDGRNGEKGETGAPGLKGEN

SEQ ID NO: 771 - protein, 38 aa, Artificial Sequence
  Synthetic sequence
HRGFDGRNGEKGETGAPGLKGENGLPGENGAPGPMGPR

SEQ ID NO: 772 - protein, 31 aa, Artificial Sequence
  Synthetic sequence
IGPSGPAGKDGESGRPGRPGERGLPGPPGIK

SEQ ID NO: 773 - protein, 12 aa, Artificial Sequence
  Synthetic sequence
IKGPAGIPGFPG

SEQ ID NO: 774 - protein, 14 aa, Artificial Sequence
  Synthetic sequence
IKGPAGIPGFPGMK

SEQ ID NO: 775 - protein, 26 aa, Artificial Sequence
  Synthetic sequence
IPGAPGLMGARGPPGPAGANGAPGLR

SEQ ID NO: 776 - protein, 17 aa, Artificial Sequence
  Synthetic sequence
IPGFPGMKGHRGFDGRN

SEQ ID NO: 777 - protein, 23 aa, Artificial Sequence
  Synthetic sequence
KDGESGRPGRPGERGLPGPPGIK

SEQ ID NO: 778 - protein, 26 aa, Artificial Sequence
  Synthetic sequence
KDGESGRPGRPGERGLPGPPGIKGPA

SEQ ID NO: 779 - protein, 32 aa, Artificial Sequence
  Synthetic sequence
KDGSPGEPGANGLPGAAGERGAPGFRGPAGPN

SEQ ID NO: 780 - protein, 19 aa, Artificial Sequence
  Synthetic sequence
KGENGLPGENGAPGPMGPR

SEQ ID NO: 781 - protein, 13 aa, Artificial Sequence
  Synthetic sequence
KGPAGIPGFPGMK

SEQ ID NO: 782 - protein, 23 aa, Artificial Sequence
  Synthetic sequence
KPGPPGSQGESGRPGPPGPSGPR

SEQ ID NO: 783 - protein, 29 aa, Artificial Sequence
  Synthetic sequence
KPGPPGSQGESGRPGPPGPSGPRGQPGVM

SEQ ID NO: 784 - protein, 20 aa, Artificial Sequence
  Synthetic sequence
LKGENGLPGENGAPGPMGPR

SEQ ID NO: 785 - protein, 20 aa, Artificial Sequence
  Synthetic sequence
LMGARGPPGPAGANGAPGLR

SEQ ID NO: 786 - protein, 29 aa, Artificial Sequence
  Synthetic sequence
LPGAAGARGNDGARGSDGQPGPPGPPGTA

SEQ ID NO: 787 - protein, 20 aa, Artificial Sequence
  Synthetic sequence
LPGAAGERGAPGFRGPAGPN

SEQ ID NO: 788 - protein, 8 aa, Artificial Sequence
  Synthetic sequence
LPGPPGIK

SEQ ID NO: 789 - protein, 11 aa, Artificial Sequence
  Synthetic sequence
LPGPPGIKGPA

SEQ ID NO: 790 - protein, 20 aa, Artificial Sequence
  Synthetic sequence
LPGPPGIKGPAGIPGFPGMK

SEQ ID NO: 791 - protein, 19 aa, Artificial Sequence
  Synthetic sequence
MGARGPPGPAGANGAPGLR

SEQ ID NO: 792 - protein, 28 aa, Artificial Sequence
  Synthetic sequence
MGARGPPGPAGANGAPGLRGGAGEPGKN

SEQ ID NO: 793 - protein, 31 aa, Artificial Sequence
  Synthetic sequence
MGPAGIPGAPGLMGARGPPGPAGANGAPGLR

SEQ ID NO: 794 - protein, 22 aa, Artificial Sequence
  Synthetic sequence
MGPRGAPGERGRPGLPGAAGAR

SEQ ID NO: 795 - protein, 41 aa, Artificial Sequence
  Synthetic sequence
MPGSPGGPGSDGKPGPPGSQGESGRPGPPGPSGPRGQPGVM

SEQ ID NO: 796 - protein, 44 aa, Artificial Sequence
  Synthetic sequence
MRGMPGSPGGPGSDGKPGPPGSQGESGRPGPPGPSGPRGQPGVM

SEQ ID NO: 797 - protein, 20 aa, Artificial Sequence
  Synthetic sequence
NDGARGSDGQPGPPGPPGTA

SEQ ID NO: 798 - protein, 35 aa, Artificial Sequence
  Synthetic sequence
NDGARGSDGQPGPPGPPGTAGFPGSPGAKGEVGPA

SEQ ID NO: 799 - protein, 15 aa, Artificial Sequence
  Synthetic sequence
NGAPGPMGPRGAPGE

SEQ ID NO: 800 - protein, 28 aa, Artificial Sequence
  Synthetic sequence
NGAPGPMGPRGAPGERGRPGLPGAAGAR

SEQ ID NO: 801 - protein, 31 aa, Artificial Sequence
  Synthetic sequence
NGEKGETGAPGLKGENGLPGENGAPGPMGPR

SEQ ID NO: 802 - protein, 18 aa, Artificial Sequence
  Synthetic sequence
NGETGPQGPPGPTGPGGD

SEQ ID NO: 803 - protein, 16 aa, Artificial Sequence
  Synthetic sequence
NGLPGENGAPGPMGPR

SEQ ID NO: 804 - protein, 22 aa, Artificial Sequence
  Synthetic sequence
NGSPGGKGEMGPAGIPGAPGLM

SEQ ID NO: 805 - protein, 40 aa, Artificial Sequence
  Synthetic sequence
NGSPGGKGEMGPAGIPGAPGLMGARGPPGPAGANGAPGLR

SEQ ID NO: 806 - protein, 11 aa, Artificial Sequence
  Synthetic sequence
PAGIPGAPGLM

SEQ ID NO: 807 - protein, 12 aa, Artificial Sequence
  Synthetic sequence
PAGIPGAPGLMG

SEQ ID NO: 808 - protein, 11 aa, Artificial Sequence
  Synthetic sequence
PAGIPGFPGMK

SEQ ID NO: 809 - protein, 12 aa, Artificial Sequence
  Synthetic sequence
PAGIPGFPGMKG

SEQ ID NO: 810 - protein, 14 aa, Artificial Sequence
  Synthetic sequence
PAGIPGFPGMKGHR

SEQ ID NO: 811 - protein, 15 aa, Artificial Sequence
  Synthetic sequence
PAGIPGFPGMKGHRG

SEQ ID NO: 812 - protein, 16 aa, Artificial Sequence
  Synthetic sequence
PAGIPGFPGMKGHRGF

SEQ ID NO: 813 - protein, 18 aa, Artificial Sequence
  Synthetic sequence
PAGIPGFPGMKGHRGFDG

SEQ ID NO: 814 - protein, 20 aa, Artificial Sequence
  Synthetic sequence
PAGIPGFPGMKGHRGFDGRN

SEQ ID NO: 815 - protein, 26 aa, Artificial Sequence
  Synthetic sequence
PAGKDGESGRPGRPGERGLPGPPGIK

SEQ ID NO: 816 - protein, 19 aa, Artificial Sequence
  Synthetic sequence
PGAAGERGAPGFRGPAGPN

SEQ ID NO: 817 - protein, 16 aa, Artificial Sequence
  Synthetic sequence
PGANGLPGAAGERGAP

SEQ ID NO: 818 - protein, 25 aa, Artificial Sequence
  Synthetic sequence
PGAPGLMGARGPPGPAGANGAPGLR

SEQ ID NO: 819 - protein, 27 aa, Artificial Sequence
  Synthetic sequence
PGEPGPKGDAGAPGAPGGKGDAGAPGE

SEQ ID NO: 820 - protein, 13 aa, Artificial Sequence
  Synthetic sequence
PGERGLPGPPGIK

SEQ ID NO: 821 - protein, 16 aa, Artificial Sequence
  Synthetic sequence
PGERGRPGLPGAAGAR

SEQ ID NO: 822 - protein, 9 aa, Artificial Sequence
  Synthetic sequence
PGFPGMKGH

SEQ ID NO: 823 - protein, 10 aa, Artificial Sequence
  Synthetic sequence
PGFPGMKGHR

SEQ ID NO: 824 - protein, 12 aa, Artificial Sequence
  Synthetic sequence
PGFPGMKGHRGF

SEQ ID NO: 825 - protein, 15 aa, Artificial Sequence
  Synthetic sequence
PGFPGMKGHRGFDGR

SEQ ID NO: 826 - protein, 21 aa, Artificial Sequence
  Synthetic sequence
PGLMGARGPPGPAGANGAPGL

SEQ ID NO: 827 - protein, 41 aa, Artificial Sequence
  Synthetic sequence
PGLPGAAGARGNDGARGSDGQPGPPGPPGTAGFPGSPGAKG

SEQ ID NO: 828 - protein, 22 aa, Artificial Sequence
  Synthetic sequence
PGPAGANGAPGLRGGAGEPGKN

SEQ ID NO: 829 - protein, 14 aa, Artificial Sequence
  Synthetic sequence
PGPAGPPGPPGPPG

SEQ ID NO: 830 - protein, 16 aa, Artificial Sequence
  Synthetic sequence
PGPAGPPGPPGPPGTS

SEQ ID NO: 831 - protein, 17 aa, Artificial Sequence
  Synthetic sequence
PGPAGPPGPPGPPGTSG

SEQ ID NO: 832 - protein, 18 aa, Artificial Sequence
  Synthetic sequence
PGPAGPPGPPGPPGTSGH

SEQ ID NO: 833 - protein, 42 aa, Artificial Sequence
  Synthetic sequence
PGPAGPPGPPGPPGTSGHPGSPGSPGYQGPPGEPGQAGPSGP

SEQ ID NO: 834 - protein, 57 aa, Artificial Sequence
  Synthetic sequence
PGPAGPPGPPGPPGTSGHPGSPGSPGYQGPPGEPGQAGPSGPPGPPGAIGPSGPAGK

SEQ ID NO: 835 - protein, 25 aa, Artificial Sequence
  Synthetic sequence
PGPMGPRGAPGERGRPGLPGAAGAR

SEQ ID NO: 836 - protein, 10 aa, Artificial Sequence
  Synthetic sequence
PGPPGAIGPS

SEQ ID NO: 837 - protein, 19 aa, Artificial Sequence
  Synthetic sequence
PGPPGIKGPAGIPGFPGMK

SEQ ID NO: 838 - protein, 19 aa, Artificial Sequence
  Synthetic sequence
PGPPGPPGTAGFPGSPGAK

SEQ ID NO: 839 - protein, 16 aa, Artificial Sequence
  Synthetic sequence
PGPPGPSGPRGQPGVM

SEQ ID NO: 840 - protein, 16 aa, Artificial Sequence
  Synthetic sequence
PGRPGERGLPGPPGIK

SEQ ID NO: 841 - protein, 34 aa, Artificial Sequence
  Synthetic sequence
PGSDGKPGPPGSQGESGRPGPPGPSGPRGQPGVM

SEQ ID NO: 842 - protein, 33 aa, Artificial Sequence
  Synthetic sequence
PGSNGAPGQRGEPGPQGHAGAQGPPGPPGINGS

SEQ ID NO: 843 - protein, 26 aa, Artificial Sequence
  Synthetic sequence
PPGAIGPSGPAGKDGESGRPGRPGER

SEQ ID NO: 844 - protein, 35 aa, Artificial Sequence
  Synthetic sequence
PPGAIGPSGPAGKDGESGRPGRPGERGLPGPPGIK

SEQ ID NO: 845 - protein, 23 aa, Artificial Sequence
  Synthetic sequence
PPGEPGQAGPSGPPGPPGAIGPS

SEQ ID NO: 846 - protein, 29 aa, Artificial Sequence
  Synthetic sequence
PPGEPGQAGPSGPPGPPGAIGPSGPAGKD

SEQ ID NO: 847 - protein, 17 aa, Artificial Sequence
  Synthetic sequence
PPGIKGPAGIPGFPGMK

SEQ ID NO: 848 - protein, 26 aa, Artificial Sequence
  Synthetic sequence
PPGINGSPGGKGEMGPAGIPGAPGLM

SEQ ID NO: 849 - protein, 14 aa, Artificial Sequence
  Synthetic sequence
PPGPAGANGAPGLR

SEQ ID NO: 850 - protein, 11 aa, Artificial Sequence
  Synthetic sequence
PPGPPGAIGPS

SEQ ID NO: 851 - protein, 38 aa, Artificial Sequence
  Synthetic sequence
PPGPPGAIGPSGPAGKDGESGRPGRPGERGLPGPPGIK

SEQ ID NO: 852 - protein, 29 aa, Artificial Sequence
  Synthetic sequence
PPGPPGINGSPGGKGEMGPAGIPGAPGLM

SEQ ID NO: 853 - protein, 23 aa, Artificial Sequence
  Synthetic sequence
PPGPPGTAGFPGSPGAKGEVGPA

SEQ ID NO: 854 - protein, 26 aa, Artificial Sequence
  Synthetic sequence
PPGSQGESGRPGPPGPSGPRGQPGVM

SEQ ID NO: 855 - protein, 20 aa, Artificial Sequence
  Synthetic sequence
PPGTAGFPGSPGAKGEVGPA

SEQ ID NO: 856 - protein, 17 aa, Artificial Sequence
  Synthetic sequence
PQGHAGAQGPPGPPGIN

SEQ ID NO: 857 - protein, 29 aa, Artificial Sequence
  Synthetic sequence
PSGPAGKDGESGRPGRPGERGLPGPPGIK

SEQ ID NO: 858 - protein, 14 aa, Artificial Sequence
  Synthetic sequence
PSGPPGPPGAIGPS

SEQ ID NO: 859 - protein, 17 aa, Artificial Sequence
  Synthetic sequence
QAGPSGPPGPPGAIGPS

SEQ ID NO: 860 - protein, 31 aa, Artificial Sequence
  Synthetic sequence
QGPPGEPGQAGPSGPPGPPGAIGPSGPAGKD

SEQ ID NO: 861 - protein, 23 aa, Artificial Sequence
  Synthetic sequence
QRGEPGPQGHAGAQGPPGPPGIN

SEQ ID NO: 862 - protein, 22 aa, Artificial Sequence
  Synthetic sequence
RGFDGRNGEKGETGAPGLKGEN

SEQ ID NO: 863 - protein, 10 aa, Artificial Sequence
  Synthetic sequence
RGLPGPPGIK

SEQ ID NO: 864 - protein, 13 aa, Artificial Sequence
  Synthetic sequence
RGLPGPPGIKGPA

SEQ ID NO: 865 - protein, 22 aa, Artificial Sequence
  Synthetic sequence
RGLPGPPGIKGPAGIPGFPGMK

SEQ ID NO: 866 - protein, 43 aa, Artificial Sequence
  Synthetic sequence
RGMPGSPGGPGSDGKPGPPGSQGESGRPGPPGPSGPRGQPGVM

SEQ ID NO: 867 - protein, 22 aa, Artificial Sequence
  Synthetic sequence
RGNDGARGSDGQPGPPGPPGTA

SEQ ID NO: 868 - protein, 31 aa, Artificial Sequence
  Synthetic sequence
RGNDGARGSDGQPGPPGPPGTAGFPGSPGAK

SEQ ID NO: 869 - protein, 37 aa, Artificial Sequence
  Synthetic sequence
RGNDGARGSDGQPGPPGPPGTAGFPGSPGAKGEVGPA

SEQ ID NO: 870 - protein, 15 aa, Artificial Sequence
  Synthetic sequence
RGPPGPAGANGAPGL

SEQ ID NO: 871 - protein, 16 aa, Artificial Sequence
  Synthetic sequence
RGPPGPAGANGAPGLR

SEQ ID NO: 872 - protein, 17 aa, Artificial Sequence
  Synthetic sequence
RGPPGPAGANGAPGLRG

SEQ ID NO: 873 - protein, 25 aa, Artificial Sequence
  Synthetic sequence
RGPPGPAGANGAPGLRGGAGEPGKN

SEQ ID NO: 874 - protein, 28 aa, Artificial Sequence
  Synthetic sequence
RGPPGPAGANGAPGLRGGAGEPGKNGAK

SEQ ID NO: 875 - protein, 25 aa, Artificial Sequence
  Synthetic sequence
RGSDGQPGPPGPPGTAGFPGSPGAK

SEQ ID NO: 876 - protein, 31 aa, Artificial Sequence
  Synthetic sequence
RGSDGQPGPPGPPGTAGFPGSPGAKGEVGPA

SEQ ID NO: 877 - protein, 14 aa, Artificial Sequence
  Synthetic sequence
RPGERGLPGPPGIK

SEQ ID NO: 878 - protein, 17 aa, Artificial Sequence
  Synthetic sequence
RPGERGLPGPPGIKGPA

SEQ ID NO: 879 - protein, 28 aa, Artificial Sequence
  Synthetic sequence
RPGLPGAAGARGNDGARGSDGQPGPPGP

SEQ ID NO: 880 - protein, 32 aa, Artificial Sequence
  Synthetic sequence
RPGLPGAAGARGNDGARGSDGQPGPPGPPGTA

SEQ ID NO: 881 - protein, 17 aa, Artificial Sequence
  Synthetic sequence
RPGPPGPSGPRGQPGVM

SEQ ID NO: 882 - protein, 17 aa, Artificial Sequence
  Synthetic sequence
RPGRPGERGLPGPPGIK

SEQ ID NO: 883 - protein, 20 aa, Artificial Sequence
  Synthetic sequence
RPGRPGERGLPGPPGIKGPA

SEQ ID NO: 884 - protein, 23 aa, Artificial Sequence
  Synthetic sequence
SDGKPGPPGSQGESGRPGPPGPS

SEQ ID NO: 885 - protein, 24 aa, Artificial Sequence
  Synthetic sequence
SDGKPGPPGSQGESGRPGPPGPSG

SEQ ID NO: 886 - protein, 26 aa, Artificial Sequence
  Synthetic sequence
SDGKPGPPGSQGESGRPGPPGPSGPR

SEQ ID NO: 887 - protein, 27 aa, Artificial Sequence
  Synthetic sequence
SDGKPGPPGSQGESGRPGPPGPSGPRG

SEQ ID NO: 888 - protein, 30 aa, Artificial Sequence
  Synthetic sequence
SDGKPGPPGSQGESGRPGPPGPSGPRGQPG

SEQ ID NO: 889 - protein, 32 aa, Artificial Sequence
  Synthetic sequence
SDGKPGPPGSQGESGRPGPPGPSGPRGQPGVM

SEQ ID NO: 890 - protein, 40 aa, Artificial Sequence
  Synthetic sequence
SDGKPGPPGSQGESGRPGPPGPSGPRGQPGVMGFPGPKGN

SEQ ID NO: 891 - protein, 14 aa, Artificial Sequence
  Synthetic sequence
SDGQPGPPGPPGTA

SEQ ID NO: 892 - protein, 23 aa, Artificial Sequence
  Synthetic sequence
SDGQPGPPGPPGTAGFPGSPGAK

SEQ ID NO: 893 - protein, 29 aa, Artificial Sequence
  Synthetic sequence
SDGQPGPPGPPGTAGFPGSPGAKGEVGPA

SEQ ID NO: 894 - protein, 28 aa, Artificial Sequence
  Synthetic sequence
SGPAGKDGESGRPGRPGERGLPGPPGIK

SEQ ID NO: 895 - protein, 13 aa, Artificial Sequence
  Synthetic sequence
SGPPGPPGAIGPS

SEQ ID NO: 896 - protein, 19 aa, Artificial Sequence
  Synthetic sequence
SGPPGPPGAIGPSGPAGKD

SEQ ID NO: 897 - protein, 31 aa, Artificial Sequence
  Synthetic sequence
SGPPGPPGAIGPSGPAGKDGESGRPGRPGER

SEQ ID NO: 898 - protein, 40 aa, Artificial Sequence
  Synthetic sequence
SGPPGPPGAIGPSGPAGKDGESGRPGRPGERGLPGPPGIK

SEQ ID NO: 899 - protein, 43 aa, Artificial Sequence
  Synthetic sequence
SGPPGPPGAIGPSGPAGKDGESGRPGRPGERGLPGPPGIKGPA

SEQ ID NO: 900 - protein, 18 aa, Artificial Sequence
  Synthetic sequence
SGPRGQPGVMGFPGPKGN

SEQ ID NO: 901 - protein, 19 aa, Artificial Sequence
  Synthetic sequence
SGRPGPPGPSGPRGQPGVM

SEQ ID NO: 902 - protein, 27 aa, Artificial Sequence
  Synthetic sequence
SGRPGPPGPSGPRGQPGVMGFPGPKGN

SEQ ID NO: 903 - protein, 16 aa, Artificial Sequence
  Synthetic sequence
SGRPGRPGERGLPGPP

SEQ ID NO: 904 - protein, 17 aa, Artificial Sequence
  Synthetic sequence
SGRPGRPGERGLPGPPG

SEQ ID NO: 905 - protein, 19 aa, Artificial Sequence
  Synthetic sequence
SGRPGRPGERGLPGPPGIK

SEQ ID NO: 906 - protein, 22 aa, Artificial Sequence
  Synthetic sequence
SGRPGRPGERGLPGPPGIKGPA

SEQ ID NO: 907 - protein, 29 aa, Artificial Sequence
  Synthetic sequence
SNGAPGQRGEPGPQGHAGAQGPPGPPGIN

SEQ ID NO: 908 - protein, 35 aa, Artificial Sequence
  Synthetic sequence
SNGAPGQRGEPGPQGHAGAQGPPGPPGINGSPGGK

SEQ ID NO: 909 - protein, 41 aa, Artificial Sequence
  Synthetic sequence
SNGAPGQRGEPGPQGHAGAQGPPGPPGINGSPGGKGEMGPA

SEQ ID NO: 910 - protein, 21 aa, Artificial Sequence
  Synthetic sequence
SPGAKGEVGPAGSPGSNGAPG

SEQ ID NO: 911 - protein, 22 aa, Artificial Sequence
  Synthetic sequence
SPGAKGEVGPAGSPGSNGAPGQ

SEQ ID NO: 912 - protein, 25 aa, Artificial Sequence
  Synthetic sequence
SPGAKGEVGPAGSPGSNGAPGQRGE

SEQ ID NO: 913 - protein, 27 aa, Artificial Sequence
  Synthetic sequence
SPGAKGEVGPAGSPGSNGAPGQRGEPG

SEQ ID NO: 914 - protein, 29 aa, Artificial Sequence
  Synthetic sequence
SPGAKGEVGPAGSPGSNGAPGQRGEPGPQ

SEQ ID NO: 915 - protein, 30 aa, Artificial Sequence
  Synthetic sequence
SPGAKGEVGPAGSPGSNGAPGQRGEPGPQG

SEQ ID NO: 916 - protein, 31 aa, Artificial Sequence
  Synthetic sequence
SPGAKGEVGPAGSPGSNGAPGQRGEPGPQGH

SEQ ID NO: 917 - protein, 33 aa, Artificial Sequence
  Synthetic sequence
SPGAKGEVGPAGSPGSNGAPGQRGEPGPQGHAG

SEQ ID NO: 918 - protein, 44 aa, Artificial Sequence
  Synthetic sequence
SPGAKGEVGPAGSPGSNGAPGQRGEPGPQGHAGAQGPPGPPGIN

SEQ ID NO: 919 - protein, 29 aa, Artificial Sequence
  Synthetic sequence
SPGEPGANGLPGAAGERGAPGFRGPAGPN

SEQ ID NO: 920 - protein, 20 aa, Artificial Sequence
  Synthetic sequence
SPGGKGEMGPAGIPGAPGLM

SEQ ID NO: 921 - protein, 22 aa, Artificial Sequence
  Synthetic sequence
SPGGKGEMGPAGIPGAPGLMGA

SEQ ID NO: 922 - protein, 23 aa, Artificial Sequence
  Synthetic sequence
SPGGKGEMGPAGIPGAPGLMGAR

SEQ ID NO: 923 - protein, 32 aa, Artificial Sequence
  Synthetic sequence
SPGGKGEMGPAGIPGAPGLMGARGPPGPAGAN

SEQ ID NO: 924 - protein, 27 aa, Artificial Sequence
  Synthetic sequence
SPGGPGSDGKPGPPGSQGESGRPGPPG

SEQ ID NO: 925 - protein, 28 aa, Artificial Sequence
  Synthetic sequence
SPGGPGSDGKPGPPGSQGESGRPGPPGP

SEQ ID NO: 926 - protein, 29 aa, Artificial Sequence
  Synthetic sequence
SPGGPGSDGKPGPPGSQGESGRPGPPGPS

SEQ ID NO: 927 - protein, 32 aa, Artificial Sequence
  Synthetic sequence
SPGGPGSDGKPGPPGSQGESGRPGPPGPSGPR

SEQ ID NO: 928 - protein, 33 aa, Artificial Sequence
  Synthetic sequence
SPGGPGSDGKPGPPGSQGESGRPGPPGPSGPRG

SEQ ID NO: 929 - protein, 38 aa, Artificial Sequence
  Synthetic sequence
SPGGPGSDGKPGPPGSQGESGRPGPPGPSGPRGQPGVM

SEQ ID NO: 930 - protein, 46 aa, Artificial Sequence
  Synthetic sequence
SPGGPGSDGKPGPPGSQGESGRPGPPGPSGPRGQPGVMGFPGPKGN

SEQ ID NO: 931 - protein, 27 aa, Artificial Sequence
  Synthetic sequence
SPGSNGAPGQRGEPGPQGHAGAQGPPG

SEQ ID NO: 932 - protein, 32 aa, Artificial Sequence
  Synthetic sequence
SPGSNGAPGQRGEPGPQGHAGAQGPPGPPGIN

SEQ ID NO: 933 - protein, 36 aa, Artificial Sequence
  Synthetic sequence
SPGSNGAPGQRGEPGPQGHAGAQGPPGPPGINGSPG

SEQ ID NO: 934 - protein, 38 aa, Artificial Sequence
  Synthetic sequence
SPGSNGAPGQRGEPGPQGHAGAQGPPGPPGINGSPGGK

SEQ ID NO: 935 - protein, 42 aa, Artificial Sequence
  Synthetic sequence
SPGSNGAPGQRGEPGPQGHAGAQGPPGPPGINGSPGGKGEMG

SEQ ID NO: 936 - protein, 44 aa, Artificial Sequence
  Synthetic sequence
SPGSNGAPGQRGEPGPQGHAGAQGPPGPPGINGSPGGKGEMGPA

SEQ ID NO: 937 - protein, 32 aa, Artificial Sequence
  Synthetic sequence
SPGSPGYQGPPGEPGQAGPSGPPGPPGAIGPS

SEQ ID NO: 938 - protein, 29 aa, Artificial Sequence
  Synthetic sequence
SPGYQGPPGEPGQAGPSGPPGPPGAIGPS

SEQ ID NO: 939 - protein, 23 aa, Artificial Sequence
  Synthetic sequence
SQGESGRPGPPGPSGPRGQPGVM

SEQ ID NO: 940 - protein, 31 aa, Artificial Sequence
  Synthetic sequence
SQGESGRPGPPGPSGPRGQPGVMGFPGPKGN

SEQ ID NO: 941 - protein, 17 aa, Artificial Sequence
  Synthetic sequence
TAGFPGSPGAKGEVGPA

SEQ ID NO: 942 - protein, 18 aa, Artificial Sequence
  Synthetic sequence
TAGFPGSPGAKGEVGPAG

SEQ ID NO: 943 - protein, 21 aa, Artificial Sequence
  Synthetic sequence
TAGFPGSPGAKGEVGPAGSPG

SEQ ID NO: 944 - protein, 23 aa, Artificial Sequence
  Synthetic sequence
TAGFPGSPGAKGEVGPAGSPGSN

SEQ ID NO: 945 - protein, 25 aa, Artificial Sequence
  Synthetic sequence
TGAPGLKGENGLPGENGAPGPMGPR

SEQ ID NO: 946 - protein, 15 aa, Artificial Sequence
  Synthetic sequence
TGPQGPPGPTGPGGD

SEQ ID NO: 947 - protein, 23 aa, Artificial Sequence
  Synthetic sequence
VGPAGSPGSNGAPGQRGEPGPQG

SEQ ID NO: 948 - protein, 42 aa, Artificial Sequence
  Synthetic sequence
GHPGSPGSPGYQGPPGEPGQAGPSGPPGPPGAIGPSGPAGKD

SEQ ID NO: 949 - protein, 35 aa, Artificial Sequence
  Synthetic sequence
GNDGARGSDGQPGPPGPPGTAGFPGSPGAKGEVGP

SEQ ID NO: 950 - protein, 50 aa, Artificial Sequence
  Synthetic sequence
GFPGPKGNDGAPGKNGERGGPGGPGPQGPPGKNGETGPQGPPGPTGPGGD

SEQ ID NO: 951 - protein, 46 aa, Artificial Sequence
  Synthetic sequence
GSPGSNGAPGQRGEPGPQGHAGAQGPPGPPGINGSPGGKGEMGPAG

SEQ ID NO: 952 - protein, 32 aa, Artificial Sequence
  Synthetic sequence
GNDGARGSDGQPGPPGPPGTAGFPGSPGAKGE

SEQ ID NO: 953 - protein, 43 aa, Artificial Sequence
  Synthetic sequence
GNDGARGSDGQPGPPGPPGTAGFPGSPGAKGEVGPAGSPGSNG

SEQ ID NO: 954 - protein, 31 aa, Artificial Sequence
  Synthetic sequence
PGPKGNDGAPGKNGERGGPGGPGPQGPPGKN

SEQ ID NO: 955 - protein, 39 aa, Artificial Sequence
  Synthetic sequence
GTSGHPGSPGSPGYQGPPGEPGQAGPSGPPGPPGAIGPS

SEQ ID NO: 956 - protein, 45 aa, Artificial Sequence
  Synthetic sequence
GHPGSPGSPGYQGPPGEPGQAGPSGPPGPPGAIGPSGPAGKDGES

SEQ ID NO: 957 - protein, 47 aa, Artificial Sequence
  Synthetic sequence
GNDGARGSDGQPGPPGPPGTAGFPGSPGAKGEVGPAGSPGSNGAPGQ

SEQ ID NO: 958 - protein, 13 aa, Artificial Sequence
  Synthetic sequence
PGSPGAKGEVGPA

SEQ ID NO: 959 - protein, 15 aa, Artificial Sequence
  Synthetic sequence
GAPGLRGGAGEPGKN

SEQ ID NO: 960 - protein, 20 aa, Artificial Sequence
  Synthetic sequence
GIPGAPGLMGARGPPGPAGA

SEQ ID NO: 961 - protein, 26 aa, Artificial Sequence
  Synthetic sequence
GFPGSPGAKGEVGPAGSPGSNGAPGQ

SEQ ID NO: 962 - protein, 13 aa, Artificial Sequence
  Synthetic sequence
PGPKGNDGAPGKN

SEQ ID NO: 963 - protein, 18 aa, Artificial Sequence
  Synthetic sequence
GEVGPAGSPGSNGAPGQR

SEQ ID NO: 964 - protein, 57 aa, Artificial Sequence
  Synthetic sequence
GYPGPAGPPGPPGPPGTSGHPGSPGSPGYQGPPGEPGQAGPSGPPGPPGAIGPSGPA

SEQ ID NO: 965 - protein, 45 aa, Artificial Sequence
  Synthetic sequence
GEKGETGAPGLKGENGLPGENGAPGPMGPRGAPGERGRPGLPGAA

SEQ ID NO: 966 - protein, 40 aa, Artificial Sequence
  Synthetic sequence
GGAGEPGKNGAKGEPGPRGERGEAGIPGVPGAKGEDGKDG

SEQ ID NO: 967 - protein, 48 aa, Artificial Sequence
  Synthetic sequence
GGAGEPGKNGAKGEPGPRGERGEAGIPGVPGAKGEDGKDGSPGEPGAN

SEQ ID NO: 968 - protein, 36 aa, Artificial Sequence
  Synthetic sequence
GHRGFDGRNGEKGETGAPGLKGENGLPGENGAPGPM

SEQ ID NO: 969 - protein, 28 aa, Artificial Sequence
  Synthetic sequence
DGQPGPPGPPGTAGFPGSPGAKGEVGPA

SEQ ID NO: 970 - protein, 32 aa, Artificial Sequence
  Synthetic sequence
ARGSDGQPGPPGPPGTAGFPGSPGAKGEVGPA

SEQ ID NO: 971 - protein, 28 aa, Artificial Sequence
  Synthetic sequence
GNDGARGSDGQPGPPGPPGTAGFPGSPG

SEQ ID NO: 972 - protein, 19 aa, Artificial Sequence
  Synthetic sequence
GNDGARGSDGQPGPPGPPG

SEQ ID NO: 973 - DNA, 4893 bp, Artificial Sequence
  Plasmid
ggatccttcagtaatgtcttgtttcttttgttgcagtggtgagccattttgacttcgtgaaagtttctttagaatagttgtttccagaggccaaacattccacccgtagtaaagtgcaagcgtaggaagaccaagactggcataaatcaggtataagtgtcgagcactggcaggtgatcttctgaaagtttctactagcagataagatccagtagtcatgcatatggcaacaatgtaccgtgtggatctaagaacgcgtcctactaaccttcgcattcgttggtccagtttgttgttatcgatcaacgtgacaaggttgtcgattccgcgtaagcatgcatacccaaggacgcctgttgcaattccaagtgagccagttccaacaatctttgtaatattagagcacttcattgtgttgcgcttgaaagtaaaatgcgaacaaattaagagataatctcgaaaccgcgacttcaaacgccaatatgatgtgcggcacacaataagcgttcatatccgctgggtgactttctcgctttaaaaaattatccgaaaaaattttctagagtgttgttactttatacttccggctcgtataatacgacaaggtgtaaggaggactaaaccatggctaaactcacctctgctgttccagtcctgactgctcgtgatgttgctggtgctgttgagttctggactgataggctcggtttctcccgtgacttcgtagaggacgactttgccggtgttgtacgtgacgacgttaccctgttcatctccgcagttcaggaccaggttgtgccagacaacactctggcatgggtatgggttcgtggtctggacgaactgtacgctgagtggtctgaggtcgtgtctaccaacttccgtgatgcatctggtccagctatgaccgagatcggtgaacagccctggggtcgtgagtttgcactgcgtgatccagctggtaactgcgtgcatttcgtcgcagaagagcaggactaacaattgacaccttacgattatttagagagtatttattagttttattgtatgtatacggatgttttattatctatttatgcccttatattctgtaactatccaaaagtcctatcttatcaagccagcaatctatgtccgcgaacgtcaactaaaaataagctttttatgctcttctctctttttttcccttcggtataattataccttgcatccacagattctcctgccaaattttgcataatcctttacaacatggctatatgggagcacttagcgccctccaaaacccatattgcctacgcatgtataggtgttttttccacaatattttctctgtgctctctttttattaaagagaagctctatatcggagaagcttctgtggccgttatattcggccttatcgtgggaccacattgcctgaattggtttgccccggaagattggggaaacttggatctgattaccttagctgcagaaaagggtaccactgagcgtcagaccccgtagaaaagatcaaaggatcttcttgagatcctttttttctgcgcgtaatctgctgcttgcaaacaaaaaaaccaccgctaccagcggtggtttgtttgccggatcaagagctaccaactctttttccgaaggtaactggcttcagcagagcgcagataccaaatactgttcttctagtgtagccgtagttaggccaccacttcaagaactctgtagcaccgcctacatacctcgctctgctaatcctgttaccagtggctgctgccagtggcgataagtcgtgtcttaccgggttggacccaagacgatagttaccggataaggcgcagcggtcgggctgaacggggggttcgtgcacacagcccagcttggagcgaacgacctacaccgaactgagatacctacagcgtgagctatgagaaagcgccacgcttcccgaagggagaaaggcggacaggtatccggtaagcggcagggtcggaacaggagagcgcacgagggagcttccagggggaaacgcctggtatctttatagtcctgtcgggtttcgccacctctgacttgagcgtcgatttttgtgatgctcgtcaggggggcggagcctatggaaaaacgccagcaacgcggcctttttacggttcctggccttttgctggccttttgctcacatgtatttaaataatgtatctaaacgcaaactccgagctggaaaaatgttaccggcgatgcgcggacaatttagaggcggcgatcaagaaacacctgctgggcgagcagtctggagcacagtcttcgatgggcccgagatcccaccgcgttcctgggtaccgggacgtgaggcagcgcgacatccatcaaatataccaggcgccaaccgagtgtctcggaaaacagcttctggatatcttccgctggcggcgcaacgacgaataatagtccctggaggtgacggaatatatatgtgtggagggtaaatctgacagggtgtagcaaaggtaatattttcctaaaacatgcaatcggctgccccgcaacgggaaaaagaatgactttggcactcttcaccagagtggggtgtcccgctcgtgtgtgcaaataggctcccactggtcaccccggattttgcagaaaaacagcaagttccggggtgtctcactggtgtccgccaataagaggagccggcaggcacggagtttacatcaagctgtctccgatacactcgactaccatccgggtctctcagagaggggaatggcactataaataccgcctccttgcgctctctgccttcatcaatcaaatcatgtacaggaacttaataattgctactgcccttacttgcggtgcatacagtgcctacgtgccttccgaaccatggagcacactgacacctgatgctagccttgaaagtgccctcaaagattactcacaaacttttggaatagctattaagtccttagatgccgacaagattaagagagacgtcaaatctggtgttgctgttggaggtttagcaggctaccctggtcccgcagggcccccaggtccgccgggtccgcccggaacatcaggtcatcccggaagccctggttcaccaggttatcagggaccgcccggagagcctggacaagctggtccctccggaccccctggtccaccaggtgctattggaccaagtggtcctgccggaaaagacggtgaatccggtagacctggtagacccggcgaaaggggtttaccaggtcctcccggaattaagggtccagccggtatacccggttttcctgggatgaagggtcacagaggatttgatggtagaaacggagagaaaggcgaaaccggtgctcccggactgaagggtgaaaacggtcttcctggtgagaacggcgctcctggacctatgggtccacgtggtgctccaggagaaagaggcagaccaggattgcctggtgcagctggtgctagaggtaacgatggtgcccgtggttccgatggacaacccgggccacccggccctccaggtaccgctggatttcctggaagccctggtgctaagggggaggttggtccggctggtagtcccggaagtaacggtgccccaggtcaaagaggcgaaccaggccctcagggtcacgcaggagcacagggaccgcctggtcctcctggtattaatggttcgcctggaggaaaaggtgaaatggggcccgcaggaatccccggtgcgcctggtcttatgggtgccaggggtcctccaggcccggccggtgcaaatggtgctcccggattacgaggaggagctggtgaacctggtaaaaacggtgccaaaggagaaccaggtcctcgtggagagcgtggtgaagctggcattcccggtgtgcctggtgcaaaaggtgaggacggtaaggacggttcccctggtgagccaggtgcgaacggactgccaggtgcagccggagagcgaggagctccaggattcaggggaccagccggtcctaacggcattcctggtgaaaaagggcccgccggtgaaaggggagctcccggtccagcaggccctcgtggagcagctggtgagcctggacgtgacggtgtcccaggagggccaggtatgaggggtatgcccgggtcccctggcggtcctggatcggatggaaaaccagggccaccaggttcgcagggtgaaagcggacgtccaggcccacccggcccttcaggtccaaggggtcagcctggtgtcatgggtttccccggtccaaagggtaatgacggagcaccgggtaaaaatggtgaacgtggtggcccaggtggtccaggaccccaaggtccaccaggaaaaaacggtgagacaggtcctcaaggacctccaggacctaccggtcctggaggagataagggagatacgggaccgccaggacctcaaggattgcaaggtttgcctggtacaggaggccctcccggagaaaatggtaagcctggagagccaggaccaaaaggcgatgctggagccccaggtgcacccggaggtaagggagacgccggtgctccgggtgagcgtggtcctccggcaattgctggtattggtggagaaaaggccggcggtttcgctccatattatggttaatcaagaggatgtcagaatgccatttgcctgagagatgcaggcttcatttttgatacttttttatttgtaacctatatagtataggattttttttgtcattttgtttcttctcgtacgagcttgctcctgatcagcctatctcgcagctgatgaatatcttgtggtaggggtttgggaaaatcattcgagtttgatgtttttcttggtatttcccactcctcttcagagtacagaagattaagtgagacgttcgtttgtgctccgga

SEQ ID NO: 974 - DNA, 6038 bp, Artificial Sequence
  Plasmid
gatccttcagtaatgtcttgtttcttttgttgcagtggtgagccattttgacttcgtgaaagtttctttagaatagttgtttccagaggccaaacattccacccgtagtaaagtgcaagcgtaggaagaccaagactggcataaatcaggtataagtgtcgagcactggcaggtgatcttctgaaagtttctactagcagataagatccagtagtcatgcatatggcaacaatgtaccgtgtggatctaagaacgcgtcctactaaccttcgcattcgttggtccagtttgttgttatcgatcaacgtgacaaggttgtcgattccgcgtaagcatgcatacccaaggacgcctgttgcaattccaagtgagccagttccaacaatctttgtaatattagagcacttcattgtgttgcgcttgaaagtaaaatgcgaacaaattaagagataatctcgaaaccgcgacttcaaacgccaatatgatgtgcggcacacaataagcgttcatatccgctgggtgactttctcgctttaaaaaattatccgaaaaaattttcctctagaatgactactttagatgacaccgcttacagatatagaacttcagtccctggtgacgcagaggcaatcgaagctttggacggatcttttacgactgataccgtttttagagttaccgccactggtgatggtttcacattgagagaagtgccagttgatccacctcttactaaagttttcccggatgatgagtcagatgacgagagcgacgatggtgaagatggcgatcctgattccagaacattcgtagcttatggtgacgacggtgacttggctggatttgtggtagtttcctatagtggttggaatcgtaggctgactgtcgaagatattgaagtggcacccgagcataggggacacggcgttggtagagccttgatgggactggcaacagagttcgctagagagcgtggtgcaggacacctgtggctagaagtcacaaatgtgaacgctccagcaatccatgcttaccgtagaatgggttttactttgtgtggtcttgacacagctttatacgacggaacagcttccgacggtgaacaagccttgtacatgtctatgccatgcccttagtaaaattgacaccttacgattatttagagagtatttattagttttattgtatgtatacggatgttttattatctatttatgcccttatattctgtaactatccaaaagtcctatcttatcaagccagcaatctatgtccgcgaacgtcaactaaaaataagctttttatgctgttctctctttttttcccttcggtataattataccttgcatccacagattctcctgccaaattttgcataatcctttacaacatggctatatgggagcacttagcgccctccaaaacccatattgcctacgcatgtataggtgttttttccacaatattttctctgtgctctctttttattaaagagaagctctatatcggagaagcttctgtggccgttatattcggccttatcgtgggaccacattgcctgaattggtttgccccggaagattggggaaacttggatctgattaccttagctgcattaccaatgcttaatcagtgaggcacctatctcagcgatctgtctatttcgttcatccatagttgcctgactccccgtcgtgtagataactacgatacgggagggcttaccatctggccccagcgctgcgatgataccgcgagaaccacgctcaccggctccggatttatcagcaataaaccagccagccggaagggccgagcgcagaagtggtcctgcaactttatccgcctccatccagtctattaattgttgccgggaagctagagtaagtagttcgccagttaatagtttgcgcaacgttgttgccatcgctacaggcatcgtggtgtcacgctcgtcgtttggtatggcttcattcagctccggttcccaacgatcaaggcgagttacatgatcccccatgttgtgcaaaaaagcggttagctccttcggtcctccgatcgttgtcagaagtaagttggccgcagtgttatcactcatggttatggcagcactgcataattctcttactgtcatgccatccgtaagatgcttttctgtgactggtgagtactcaaccaagtcattctgagaatagtgtatgcggcgaccgagttgctcttgcccggcgtcaatacgggataataccgcgccacatagcagaactttaaaagtgctcatcattggaaaacgttcttcggggcgaaaactctcaaggatcttaccgctgttgagatccagttcgatgtaacccactcgtgcacccaactgatcttcagcatcttttactttcaccagcgtttctgggtgagcaaaaacaggaaggcaaaatgccgcaaaaaagggaataagggcgacacggaaatgttgaatactcatattcttcctttttcaatattattgaagcatttatcagggttattgtctcatgagcggatacatatttgaatgtatttagaaaaataaacaaataggggtcagtgttacaaccaattaaccaattctgaaaggaagaatctgcaggaaaagggtaccactgagcgtcagaccccgtagaaaagatcaaaggatcttcttgagatcctttttttctgcgcgtaatctgctgcttgcaaacaaaaaaaccaccgctaccagcggtggtttgtttgccggatcaagagctaccaactctttttccgaaggtaactggcttcagcagagcgcagataccaaatactgttcttctagtgtagccgtagttaggccaccacttcaagaactctgtagcaccgcctacatacctcgctctgctaatcctgttaccagtggctgctgccagtggcgataagtcgtgtcttaccgggttggacccaagacgatagttaccggataaggcgcagcggtcgggctgaacggggggttcgtgcacacagcccagcttggagcgaacgacctacaccgaactgagatacctacagcgtgagctatgagaaagcgccacgcttcccgaagggagaaaggcggacaggtatccggtaagcggcagggtcggaacaggagagcgcacgagggagcttccagggggaaacgcctggtatctttatagtcctgtcgggtttcgccacctctgacttgagcgtcgatttttgtgatgctcgtcaggggggcggagcctatggaaaaacgccagcaacgcggcctttttacggttcctggccttttgctggccttttgctcacatgtatttaaataatgtatctaaacgcaaactccgagctggaaaaatgttaccggcgatgcgcggacaatttagaggcggcgatcaagaaacacctgctgggcgagcagtctggagcacagtcttcgatgggcccgagatcccaccgcgttcctgggtaccgggacgtgaggcagcgcgacatccatcaaatataccaggcgccaaccgagtgtctcggaaaacagcttctggatatcttccgctggcggcgcaacgacgaataatagtccctggaggtgacggaatatatatgtgtggagggtaaatctgacagggtgtagcaaaggtaatattttcctaaaacatgcaatcggctgccccgcaacgggaaaaagaatgactttggcactcttcaccagagtggggtgtcccgctcgtgtgtgcaaataggctcccactggtcaccccggattttgcagaaaaacagcaagttccggggtgtctcactggtgtccgccaataagaggagccggcaggcacggagtttacatcaagctgtctccgatacactcgactaccatccgggtctctcagagaggggaatggcactataaataccgcctccttgcgctctctgccttcatcaatcaaatcatgtacaggaacttaataattgctactgcccttacttgcggtgcatacagtgcctacgtgccttccgaaccatggagcacactgacacctgatgctagccttgaaagtgccctcaaagattactcacaaacttttggaatagctattaagtccttagatgccgacaagattaagagagacgtcaaatctggtgttgctgttggaggtttagcaggctaccctggtcccgcagggcccccaggtccgccgggtccgcccggaacatcaggtcatcccggaagccctggttcaccaggttatcagggaccgcccggagagcctggacaagctggtccctccggaccccctggtccaccaggtgctattggaccaagtggtcctgccggaaaagacggtgaatccggtagacctggtagacccggcgaaaggggtttaccaggtcctcccggaattaagggtccagccggtatacccggttttcctgggatgaagggtcacagaggatttgatggtagaaacggagagaaaggcgaaaccggtgctcccggactgaagggtgaaaacggtcttcctggtgagaacggcgctcctggacctatgggtccacgtggtgctccaggagaaagaggcagaccaggattgcctggtgcagctggtgctagaggtaacgatggtgcccgtggttccgatggacaacccgggccacccggccctccaggtaccgctggatttcctggaagccctggtgctaagggggaggttggtccggctggtagtcccggaagtaacggtgccccaggtcaaagaggcgaaccaggccctcagggtcacgcaggagcacagggaccgcctggtcctcctggtattaatggttcgcctggaggaaaaggtgaaatggggcccgcaggaatccccggtgcgcctggtcttatgggtgccaggggtcctccaggcccggccggtgcaaatggtgctcccggattacgaggaggagctggtgaacctggtaaaaacggtgccaaaggagaaccaggtcctcgtggagagcgtggtgaagctggcattcccggtgtgcctggtgcaaaaggtgaggacggtaaggacggttcccctggtgagccaggtgcgaacggactgccaggtgcagccggagagcgaggagctccaggattcaggggaccagccggtcctaacggcattcctggtgaaaaagggcccgccggtgaaaggggagctcccggtccagcaggccctcgtggagcagctggtgagcctggacgtgacggtgtcccaggagggccaggtatgaggggtatgcccgggtcccctggcggtcctggatcggatggaaaaccagggccaccaggttcgcagggtgaaagcggacgtccaggcccacccggcccttcaggtccaaggggtcagcctggtgtcatgggtttccccggtccaaagggtaatgacggagcaccgggtaaaaatggtgaacgtggtggcccaggtggtccaggaccccaaggtccaccaggaaaaaacggtgagacaggtcctcaaggacctccaggacctaccggtcctggaggagataagggagatacgggaccgccaggacctcaaggattgcaaggtttgcctggtacaggaggccctcccggagaaaatggtaagcctggagagccaggaccaaaaggcgatgctggagccccaggtgcacccggaggtaagggagacgccggtgctccgggtgagcgtggtcctccggcaattgctggtattggtggagaaaaggccggcggtttcgctccatattatggttaatcaagaggatgtcagaatgccatttgcctgagagatgcaggcttcatttttgatacttttttatttgtaacctatatagtataggattttttttgtcattttgtttcttctcgtacgagcttgctcctgatcagcctatctcgcagctgatgaatatcttgtggtaggggtttgggaaaatcattcgagtttgatgtttttcttggtatttcccactcctcttcagagtacagaagattaagtgagacgttcgtttgtgctccggag

SEQ ID NO: 975 - DNA, 59 bp, Artificial Sequence
  Primer
cttgcgctctctgccttcatcaatcaaatcatgtacaggaacttaataattgctactgc

SEQ ID NO: 976 - DNA, 30 bp, Artificial Sequence
  Primer
tctcttaatcttgtcggcatctaaggactt

SEQ ID NO: 977 - DNA, 108 bp, Artificial Sequence
  Primer
gcaaatggcattctgacatcctcttgattaaccataatatggagcgaaaccgccggccttttctccaccaataccagcaattgccggaggaccacgctcacccggagc

SEQ ID NO: 978 - protein, 1463 aa, Artificial Sequence
  Col1A1, described by Accession No. NP_001029211.1
MFSFVDLRLLLLLAATALLTHGQEEGQEEGQEEDIPPVTCVQNGLRYHDRDVWKPVPCQICVCDNGNVLCDDVICDELKDCPNAKVPTDECCPVCPEGQESPTDQETTGVEGPKGDTGPRGPRGPAGPPGRDGIPGQPGLPGPPGPPGPPGPPGLGGNFAPQLSYGYDEKSTGISVPGPMGPSGPRGLPGPPGAPGPQGFQGPPGEPGEPGASGPMGPRGPPGPPGKNGDDGEAGKPGRPGERGPPGPQGARGLPGTAGLPGMKGHRGFSGLDGAKGDAGPAGPKGEPGSPGENGAPGQMGPRGLPGERGRPGAPGPAGARGNDGATGAAGPPGPTGPAGPPGFPGAVGAKGEGGPQGPRGSEGPQGVRGEPGPPGPAGAAGPAGNPGADGQPGAKGANGAPGIAGAPGFPGARGPSGPQGPSGPPGPKGNSGEPGAPGSKGDTGAKGEPGPTGIQGPPGPAGEEGKRGARGEPGPAGLPGPPGERGGPGSRGFPGADGVAGPKGPAGERGAPGPAGPKGSPGEAGRPGEAGLPGAKGLTGSPGSPGPDGKTGPPGPAGQDGRPGPPGPPGARGQAGVMGFPGPKGAAGEPGKAGERGVPGPPGAVGPAGKDGEAGAQGPPGPAGPAGERGEQGPAGSPGFQGLPGPAGPPGEAGKPGEQGVPGDLGAPGPSGARGERGFPGERGVQGPPGPAGPRGANGAPGNDGAKGDAGAPGAPGSQGAPGLQGMPGERGAAGLPGPKGDRGDAGPKGADGAPGKDGVRGLTGPIGPPGPAGAPGDKGEAGPSGPAGPTGARGAPGDRGEPGPPGPAGFAGPPGADGQPGAKGEPGDAGAKGDAGPPGPAGPAGPPGPIGNVGAPGPKGARGSAGPPGATGFPGAAGRVGPPGPSGNAGPPGPPGPAGKEGSKGPRGETGPAGRPGEVGPPGPPGPAGEKGAPGADGPAGAPGTPGPQGIAGQRGVVGLPGQRGERGFPGLPGPSGEPGKQGPSGASGERGPPGPMGPPGLAGPPGESGREGAPGAEGSPGRDGSPGAKGDRGETGPAGPPGAPGAPGAPGPVGPAGKSGDRGETGPAGPAGPIGPVGARGPAGPQGPRGDKGETGEQGDRGIKGHRGFSGLQGPPGPPGSPGEQGPSGASGPAGPRGPPGSAGSPGKDGLNGLPGPIGPPGPRGRTGDAGPAGPPGPPGPPGPPGPPSGGYDLSFLPQPPQEKAHDGGRYYRADDANVVRDRDLEVDTTLKSLSQQIENIRSPEGSRKNPARTCRDLKMCHSDWKSGEYWIDPNQGCNLDAIKVFCNMETGETCVYPTQPSVAQKNWYISKNPKEKRHVWYGESMTGGFQFEYGGQGSDPADVAIQLTFLRLMSTEASQNITYHCKNSVAYMDQQTGNLKKALLLQGSNEIEIRAEGNSRFTYSVTYDGCTSHTGAWGKTVIEYKTTKTSRLPIIDVAPLDVGAPDQEFGFDVGPACFL

SEQ ID NO: 979 - protein, 1364 aa, Artificial Sequence
  Col1A2, described by Accession No. NP_776945.1
MLSFVDTRTLLLLAVTSCLATCQSLQEATARKGPSGDRGPRGERGPPGPPGRDGDDGIPGPPGPPGPPGPPGLGGNFAAQFDAKGGGPGPMGLMGPRGPPGASGAPGPQGFQGPPGEPGEPGQTGPAGARGPPGPPGKAGEDGHPGKPGRPGERGVVGPQGARGFPGTPGLPGFKGIRGHNGLDGLKGQPGAPGVKGEPGAPGENGTPGQTGARGLPGERGRVGAPGPAGARGSDGSVGPVGPAGPIGSAGPPGFPGAPGPKGELGPVGNPGPAGPAGPRGEVGLPGLSGPVGPPGNPGANGLPGAKGAAGLPGVAGAPGLPGPRGIPGPVGAAGATGARGLVGEPGPAGSKGESGNKGEPGAVGQPGPPGPSGEEGKRGSTGEIGPAGPPGPPGLRGNPGSRGLPGADGRAGVMGPAGSRGATGPAGVRGPNGDSGRPGEPGLMGPRGFPGSPGNIGPAGKEGPVGLPGIDGRPGPIGPAGARGEPGNIGFPGPKGPSGDPGKAGEKGHAGLAGARGAPGPDGNNGAQGPPGLQGVQGGKGEQGPAGPPGFQGLPGPAGTAGEAGKPGERGIPGEFGLPGPAGARGERGPPGESGAAGPTGPIGSRGPSGPPGPDGNKGEPGVVGAPGTAGPSGPSGLPGERGAAGIPGGKGEKGETGLRGDIGSPGRDGARGAPGAIGAPGPAGANGDRGEAGPAGPAGPAGPRGSPGERGEVGPAGPNGFAGPAGAAGQPGAKGERGTKGPKGENGPVGPTGPVGAAGPSGPNGPPGPAGSRGDGGPPGATGFPGAAGRTGPPGPSGISGPPGPPGPAGKEGLRGPRGDQGPVGRSGETGASGPPGFVGEKGPSGEPGTAGPPGTPGPQGLLGAPGFLGLPGSRGERGLPGVAGSVGEPGPLGIAGPPGARGPPGNVGNPGVNGAPGEAGRDGNPGNDGPPGRDGQPGHKGERGYPGNAGPVGAAGAPGPQGPVGPVGKHGNRGEPGPAGAVGPAGAVGPRGPSGPQGIRGDKGEPGDKGPRGLPGLKGHNGLQGLPGLAGHHGDQGAPGAVGPAGPRGPAGPSGPAGKDGRIGQPGAVGPAGIRGSQGSQGPAGPPGPPGPPGPPGPSGGGYEFGFDGDFYRADQPRSPTSLRPKDYEVDATLKSLNNQIETLLTPEGSRKNPARTCRDLRLSHPEWSSGYYWIDPNQGCTMDAIKVYCDFSTGETCIRAQPEDIPVKNWYRNSKAKKHVWVGETINGGTQFEYNVEGVTTKEMATQLAFMRLLANHASQNITYHCKNSIAYMDEETGNLKKAVILQGSNDVELVAEGNSRFTYTVLVDGCSKKTNEWQKTIIEYKTNKPSRLPILDIAPLDIGGADQEIRLNIGPVCFK

SEQ ID NO: 980 - protein, 1466 aa, Artificial Sequence
  Col3A1, described by Accession No. NP_001070299.1
MMSFVQKGTWLLFALLHPTVILAQQEAVDGGCSHLGQSYADRDVWKPEPCQICVCDSGSVLCDDIICDDQELDCPNPEIPFGECCAVCPQPPTAPTRPPNGQGPQGPKGDPGPPGIPGRNGDPGPPGSPGSPGSPGPPGICESCPTGGQNYSPQYEAYDVKSGVAGGGIAGYPGPAGPPGPPGPPGTSGHPGAPGAPGYQGPPGEPGQAGPAGPPGPPGAIGPSGPAGKDGESGRPGRPGERGFPGPPGMKGPAGMPGFPGMKGHRGFDGRNGEKGETGAPGLKGENGVPGENGAPGPMGPRGAPGERGRPGLPGAAGARGNDGARGSDGQPGPPGPPGTAGFPGSPGAKGEVGPAGSPGSSGAPGQRGEPGPQGHAGAPGPPGPPGSNGSPGGKGEMGPAGIPGAPGLIGARGPPGPPGTNGVPGQRGAAGEPGKNGAKGDPGPRGERGEAGSPGIAGPKGEDGKDGSPGEPGANGLPGAAGERGVPGFRGPAGANGLPGEKGPPGDRGGPGPAGPRGVAGEPGRDGLPGGPGLRGIPGSPGGPGSDGKPGPPGSQGETGRPGPPGSPGPRGQPGVMGFPGPKGNDGAPGKNGERGGPGGPGPQGPAGKNGETGPQGPPGPTGPSGDKGDTGPPGPQGLQGLPGTSGPPGENGKPGEPGPKGEAGAPGIPGGKGDSGAPGERGPPGAGGPPGPRGGAGPPGPEGGKGAAGPPGPPGSAGTPGLQGMPGERGGPGGPGPKGDKGEPGSSGVDGAPGKDGPRGPTGPIGPPGPAGQPGDKGESGAPGVPGIAGPRGGPGERGEQGPPGPAGFPGAPGQNGEPGAKGERGAPGEKGEGGPPGAAGPAGGSGPAGPPGPQGVKGERGSPGGPGAAGFPGGRGPPGPPGSNGNPGPPGSSGAPGKDGPPGPPGSNGAPGSPGISGPKGDSGPPGERGAPGPQGPPGAPGPLGIAGLTGARGLAGPPGMPGARGSPGPQGIKGENGKPGPSGQNGERGPPGPQGLPGLAGTAGEPGRDGNPGSDGLPGRDGAPGAKGDRGENGSPGAPGAPGHPGPPGPVGPAGKSGDRGETGPAGPSGAPGPAGSRGPPGPQGPRGDKGETGERGAMGIKGHRGFPGNPGAPGSPGPAGHQGAVGSPGPAGPRGPVGPSGPPGKDGASGHPGPIGPPGPRGNRGERGSEGSPGHPGQPGPPGPPGAPGPCCGAGGVAAIAGVGAEKAGGFAPYYGDEPIDFKINTDEIMTSLKSVNGQIESLISPDGSRKNPARNCRDLKFCHPELQSGEYWVDPNQGCKLDAIKVYCNMETGETCISASPLTIPQKNWWTDSGAEKKHVWFGESMEGGFQFSYGNPELPEDVLDVQLAFLRLLSSRASQNITYHCKNSIAYMDHASGNVKKALKLMGSNEGEFKAEGNSKFTYTVLEDGCTKHTGEWGKTVFQYQTRKAVRLPIVDIAPYDIGGPDQEFGADIGPVCFL

SEQ ID NO: 981 - DNA, 87 bp, Artificial Sequence
  Primer
aagtccttagatgccgacaagattaagagagacgtcaaatctggtgttgctgttggaggtttagcaggctaccctggtcccgcaggg

SEQ ID NO: 982 - protein, 1466 aa, Artificial Sequence
  Human COL3A1, described by Accession No. P02461.4
MMSFVQKGSWLLLALLHPTIILAQQEAVEGGCSHLGQSYADRDVWKPEPCQICVCDSGSVLCDDIICDDQELDCPNPEIPFGECCAVCPQPPTAPTRPPNGQGPQGPKGDPGPPGIPGRNGDPGIPGQPGSPGSPGPPGICESCPTGPQNYSPQYDSYDVKSGVAVGGLAGYPGPAGPPGPPGPPGTSGHPGSPGSPGYQGPPGEPGQAGPSGPPGPPGAIGPSGPAGKDGESGRPGRPGERGLPGPPGIKGPAGIPGFPGMKGHRGFDGRNGEKGETGAPGLKGENGLPGENGAPGPMGPRGAPGERGRPGLPGAAGARGNDGARGSDGQPGPPGPPGTAGFPGSPGAKGEVGPAGSPGSNGAPGQRGEPGPQGHAGAQGPPGPPGINGSPGGKGEMGPAGIPGAPGLMGARGPPGPAGANGAPGLRGGAGEPGKNGAKGEPGPRGERGEAGIPGVPGAKGEDGKDGSPGEPGANGLPGAAGERGAPGFRGPAGPNGIPGEKGPAGERGAPGPAGPRGAAGEPGRDGVPGGPGMRGMPGSPGGPGSDGKPGPPGSQGESGRPGPPGPSGPRGQPGVMGFPGPKGNDGAPGKNGERGGPGGPGPQGPPGKNGETGPQGPPGPTGPGGDKGDTGPPGPQGLQGLPGTGGPPGENGKPGEPGPKGDAGAPGAPGGKGDAGAPGERGPPGLAGAPGLRGGAGPPGPEGGKGAAGPPGPPGAAGTPGLQGMPGERGGLGSPGPKGDKGEPGGPGADGVPGKDGPRGPTGPIGPPGPAGQPGDKGEGGAPGLPGIAGPRGSPGERGETGPPGPAGFPGAPGQNGEPGGKGERGAPGEKGEGGPPGVAGPPGGSGPAGPPGPQGVKGERGSPGGPGAAGFPGARGLPGPPGSNGNPGPPGPSGSPGKDGPPGPAGNTGAPGSPGVSGPKGDAGQPGEKGSPGAQGPPGAPGPLGIAGITGARGLAGPPGMPGPRGSPGPQGVKGESGKPGANGLSGERGPPGPQGLPGLAGTAGEPGRDGNPGSDGLPGRDGSPGGKGDRGENGSPGAPGAPGHPGPPGPVGPAGKSGDRGESGPAGPAGAPGPAGSRGAPGPQGPRGDKGETGERGAAGIKGHRGFPGNPGAPGSPGPAGQQGAIGSPGPAGPRGPVGPSGPPGKDGTSGHPGPIGPPGPRGNRGERGSEGSPGHPGQPGPPGPPGAPGPCCGGVGAAAIAGIGGEKAGGFAPYYGDEPMDFKINTDEIMTSLKSVNGQIESLISPDGSRKNPARNCRDLKFCHPELKSGEYWVDPNQGCKLDAIKVFCNMETGETCISANPLNVPRKHWWTDSSAEKKHVWFGESMDGGFQFSYGNPELPEDVLDVHLAFLRLLSSRASQNITYHCKNSIAYMDQASGNVKKALKLMGSNEGEFKAEGNSKFTYTVLEDGCTKHTGEWSKTVFEYRTRKAVRLPIVDIAPYDIGGPDQEFGVDVGPVCFL

SEQ ID NO: 983 - DNA, 5053 bp, Artificial Sequence
  Primer
ggatccttcagtaatgtcttgtttcttttgttgcagtggtgagccattttgacttcgtgaaagtttctttagaatagttgtttccagaggccaaacattccacccgtagtaaagtgcaagcgtaggaagaccaagactggcataaatcaggtataagtgtcgagcactggcaggtgatcttctgaaagtttctactagcagataagatccagtagtcatgcatatggcaacaatgtaccgtgtggatctaagaacgcgtcctactaaccttcgcattcgttggtccagtttgttgttatcgatcaacgtgacaaggttgtcgattccgcgtaagcatgcatacccaaggacgcctgttgcaattccaagtgagccagttccaacaatctttgtaatattagagcacttcattgtgttgcgcttgaaagtaaaatgcgaacaaattaagagataatctcgaaaccgcgacttcaaacgccaatatgatgtgcggcacacaataagcgttcatatccgctgggtgactttctcgctttaaaaaattatccgaaaaaattttcctctagaatgactactttagatgacaccgcttacagatatagaacttcagtccctggtgacgcagaggcaatcgaagctttggacggatcttttacgactgataccgtttttagagttaccgccactggtgatggtttcacattgagagaagtgccagttgatccacctcttactaaagttttcccggatgatgagtcagatgacgagagcgacgatggtgaagatggcgatcctgattccagaacattcgtagcttatggtgacgacggtgacttggctggatttgtggtagtttcctatagtggttggaatcgtaggctgactgtcgaagatattgaagtggcacccgagcataggggacacggcgttggtagagccttgatgggactggcaacagagttcgctagagagcgtggtgcaggacacctgtggctagaagtcacaaatgtgaacgctccagcaatccatgcttaccgtagaatgggttttactttgtgtggtcttgacacagctttatacgacggaacagcttccgacggtgaacaagccttgtacatgtctatgccatgcccttagtaaaattgacaccttacgattatttagagagtatttattagttttattgtatgtatacggatgttttattatctatttatgcccttatattctgtaactatccaaaagtcctatcttatcaagccagcaatctatgtccgcgaacgtcaactaaaaataagctttttatgctgttctctctttttttcccttcggtataattataccttgcatccacagattctcctgccaaattttgcataatcctttacaacatggctatatgggagcacttagcgccctccaaaacccatattgcctacgcatgtataggtgttttttccacaatattttctctgtgctctctttttattaaagagaagctctatatcggagaagcttctgtggccgttatattcggccttatcgtgggaccacattgcctgaattggtttgccccggaagattggggaaacttggatctgattaccttagctgcattaccaatgcttaatcagtgaggcacctatctcagcgatctgtctatttcgttcatccatagttgcctgactccccgtcgtgtagataactacgatacgggagggcttaccatctggccccagcgctgcgatgataccgcgagaaccacgctcaccggctccggatttatcagcaataaaccagccagccggaagggccgagcgcagaagtggtcctgcaactttatccgcctccatccagtctattaattgttgccgggaagctagagtaagtagttcgccagttaatagtttgcgcaacgttgttgccatcgctacaggcatcgtggtgtcacgctcgtcgtttggtatggcttcattcagctccggttcccaacgatcaaggcgagttacatgatcccccatgttgtgcaaaaaagcggttagctccttcggtcctccgatcgttgtcagaagtaagttggccgcagtgttatcactcatggttatggcagcactgcataattctcttactgtcatgccatccgtaagatgcttttctgtgactggtgagtactcaaccaagtcattctgagaatagtgtatgcggcgaccgagttgctcttgcccggcgtcaatacgggataataccgcgccacatagcagaactttaaaagtgctcatcattggaaaacgttcttcggggcgaaaactctcaaggatcttaccgctgttgagatccagttcgatgtaacccactcgtgcacccaactgatcttcagcatcttttactttcaccagcgtttctgggtgagcaaaaacaggaaggcaaaatgccgcaaaaaagggaataagggcgacacggaaatgttgaatactcatattcttcctttttcaatattattgaagcatttatcagggttattgtctcatgagcggatacatatttgaatgtatttagaaaaataaacaaataggggtcagtgttacaaccaattaaccaattctgaaaggaagaatctgcaggaaaagggtaccactgagcgtcagaccccgtagaaaagatcaaaggatcttcttgagatcctttttttctgcgcgtaatctgctgcttgcaaacaaaaaaaccaccgctaccagcggtggtttgtttgccggatcaagagctaccaactctttttccgaaggtaactggcttcagcagagcgcagataccaaatactgttcttctagtgtagccgtagttaggccaccacttcaagaactctgtagcaccgcctacatacctcgctctgctaatcctgttaccagtggctgctgccagtggcgataagtcgtgtcttaccgggttggacccaagacgatagttaccggataaggcgcagcggtcgggctgaacggggggttcgtgcacacagcccagcttggagcgaacgacctacaccgaactgagatacctacagcgtgagctatgagaaagcgccacgcttcccgaagggagaaaggcggacaggtatccggtaagcggcagggtcggaacaggagagcgcacgagggagcttccagggggaaacgcctggtatctttatagtcctgtcgggtttcgccacctctgacttgagcgtcgatttttgtgatgctcgtcaggggggcggagcctatggaaaaacgccagcaacgcggcctttttacggttcctggccttttgctggccttttgctcacatgtatttaaataatgtatctaaacgcaaactccgagctggaaaaatgttaccggcgatgcgcggacaatttagaggcggcgatcaagaaacacctgctgggcgagcagtctggagcacagtcttcgatgggcccgagatcccaccgcgttcctgggtaccgggacgtgaggcagcgcgacatccatcaaatataccaggcgccaaccgagtgtctcggaaaacagcttctggatatcttccgctggcggcgcaacgacgaataatagtccctggaggtgacggaatatatatgtgtggagggtaaatctgacagggtgtagcaaaggtaatattttcctaaaacatgcaatcggctgccccgcaacgggaaaaagaatgactttggcactcttcaccagagtggggtgtcccgctcgtgtgtgcaaataggctcccactggtcaccccggattttgcagaaaaacagcaagttccggggtgtctcactggtgtccgccaataagaggagccggcaggcacggagtttacatcaagctgtctccgatacactcgactaccatccgggtctctcagagaggggaatggcactataaataccgcctccttgcgctctctgccttcatcaatcaaatcatgctgaggactcgaattcgacctctgttgcctctttgttggacgaaccattcaccggtgtcttgtacttaaagggcagtggtatcactgaagacttccagtccctaaagggtaagaagatcggttacgttggtgacttcggtaagatccaaatcgatgaattgaccaagcactacggtatgaagccagaagactacaccgccgtcagatgtggtatgaatgtcgccaagtacatcatcgaaggtaagattgatgccggtattggtatcgaatgtatgcaacaagtcgaattggaagagtacttggccaagcaaggcagaccagcttctgatgctaaaatgttgagaattgacaagttggcttgcttgggttgctgttgcttctgtaccgttctttacatctgcaacgatgaatttttgaagaagaaccctgaaaaggtcagaaagttcttgaaagccatcaagaaggcaaccgactacgttctagccgaccctgtgaaggcttggaaagaatacatcgacttcaagcctcaattgaacaacgatctatcctacaagcaataccaaagatgttacgcttacttctcttcatctttgtacaatgttcaccgtgactggaagaaggttaccggttacggtaagagattagccatcttgccaccagactatgtctcgaactacactaatgaatacttgtcctggccagaaccagaagaggtttctgatcctttggaagctcaaagattgatggctattcatcaagaaaaatgcagacaggaaggtactttcaagagattggctcttccagcttaagcggccgcgagtcgtgagtaatcaagaggatgtcagaatgccatttgcctgagagatgcaggcttcatttttgatacttttttatttgtaacctatatagtataggattttttttgtcattttgtttcttctcgtacgagcttgctcctgatcagcctatctcgcagctgatgaatatcttgtggtaggggtttgggaaaatcattcgagtttgatgtttttcttggtatttcccactcctcttcagagtacagaagattaagtgagacgttcgtttgtgctccgga

SEQ ID NO: 984 - DNA, 6696 bp, Artificial Sequence
  Primer
aagagaagctctatatcggagaagcttctgtggccgttatattcggccttatcgtgggaccacattgcctgaattggtttgccccggaagattggggaaacttggatctgattaccttagctgcagaaaagggtaccactgagcgtcagaccccgtagaaaagatcaaaggatcttcttgagatcctttttttctgcgcgtaatctgctgcttgcaaacaaaaaaaccaccgctaccagcggtggtttgtttgccggatcaagagctaccaactctttttccgaaggtaactggcttcagcagagcgcagataccaaatactgttcttctagtgtagccgtagttaggccaccacttcaagaactctgtagcaccgcctacatacctcgctctgctaatcctgttaccagtggctgctgccagtggcgataagtcgtgtcttaccgggttggacccaagacgatagttaccggataaggcgcagcggtcgggctgaacggggggttcgtgcacacagcccagcttggagcgaacgacctacaccgaactgagatacctacagcgtgagctatgagaaagcgccacgcttcccgaagggagaaaggcggacaggtatccggtaagcggcagggtcggaacaggagagcgcacgagggagcttccagggggaaacgcctggtatctttatagtcctgtcgggtttcgccacctctgacttgagcgtcgatttttgtgatgctcgtcaggggggcggagcctatggaaaaacgccagcaacgcggcctttttacggttcctggccttttgctggccttttgctcacatgtatttaaataatgtatctaaacgcaaactccgagctggaaaaatgttaccggcgatgcgcggacaatttagaggcggcgatcaagaaacacctgctgggcgagcagtctggagcacagtcttcgatgggcccgagatcccaccgcgttcctgggtaccgggacgtgaggcagcgcgacatccatcaaatataccaggcgccaaccgagtgtctcggaaaacagcttctggatatcttccgctggcggcgcaacgacgaataatagtccctggaggtgacggaatatatatgtgtggagggtaaatctgacagggtgtagcaaaggtaatattttcctaaaacatgcaatcggctgccccgcaacgggaaaaagaatgactttggcactcttcaccagagtggggtgtcccgctcgtgtgtgcaaataggctcccactggtcaccccggattttgcagaaaaacagcaagttccggggtgtctcactggtgtccgccaataagaggagccggcaggcacggagtttacatcaagctgtctccgatacactcgactaccatccgggtctctcagagaggggaatggcactataaataccgcctccttgcgctctctgccttcatcaatcaaatcatgtacaggaacttaataattgctactgcccttacttgcggtgcatacagtgcctacgtgccttccgaaccatggagcacactgacacctgatgctagccttgaaagtgccctcaaagattactcacaaacttttggaatagctattaagtccttagatgccgacaagattaagagagacgtcaaatctggtgttgctggaggaggtattgcaggctaccctggtcccgcagggcccccaggtccgccgggtccgcccggaacatcaggtcatcccggagcccctggtgcaccaggttatcagggaccgcccggagagcctggacaagctggtcccgctggaccccctggtccaccaggtgctattggaccaagtggtcctgccggaaaagacggtgaatccggtagacctggtagacccggcgaaaggggtttcccaggtcctcccggaatgaagggtccagccggtatgcccggttttcctgggatgaagggtcacagaggatttgatggtagaaacggagagaaaggcgaaaccggtgctcccggactgaagggtgaaaacggtgtccctggtgagaacggcgctcctggacctatgggtccacgtggtgctccaggagaaagaggcagaccaggattgcctggtgcagctggtgctagaggtaacgatggtgcccgtggttccgatggacaacccgggccacccggccctccaggtaccgctggatttcctggaagccctggtgctaagggggaggttggtccggctggtagtcccggaagtagcggtgccccaggtcaaagaggcgaaccaggccctcagggtcacgcaggagcacctggaccgcctggtcctcctggttcgaatggttcgcctggaggaaaaggtgaaatggggcccgcaggaatccccggtgcgcctggtcttattggtgccaggggtcctccaggcccgccaggtacaaatggtgtacccggacagcgaggagcagctggtgaacctggtaaaaacggtgccaaaggagatccaggtcctcgtggagagcgtggtgaagctggctctcccggtatcgccggtccaaaaggtgaggacggtaaggacggttcccctggtgagccaggtgcgaacggactgccaggtgcagccggagagcgaggagtcccaggattcaggggaccagccggtgctaacggcttgcctggtgaaaaagggccccctggtgataggggaggacccggtccagcaggccctcgtggagttgctggtgagcctggacgtgacggtttaccaggagggccaggtttgaggggtattcccgggtcccctggcggtcctggatcggatggaaaaccagggccaccaggttcgcagggtgaaacaggacgtccaggcccacccggctcacctggtccaaggggtcagcctggtgtcatgggtttccccggtccaaagggtaatgacggagcaccgggtaaaaatggtgaacgtggtggcccaggtggtccaggaccccaaggtccagctggaaaaaacggtgagacaggtcctcaaggacctccaggacctaccggtcctagcggagataagggagatacgggaccgccaggacctcaaggattgcaaggtttgcctggtacatctggccctcccggagaaaatggtaagcctggagagccaggaccaaaaggcgaagctggagccccaggtatccccggaggtaagggagactcaggtgctccgggtgagcgtggtcctccgggtgccggtggtccacctggacctagaggtggtgccgggccgccaggtcctgaaggtggtaaaggtgctgctggtccaccgggaccgcctggctctgctggtactcctggcttgcagggaatgccaggagagagaggtggacctggaggtcccggtccgaagggtgataaaggggagccaggatcatccggtgttgacggcgcacctggtaaagacggaccaaggggaccaacgggtccaatcggaccaccaggacccgctggccagccaggagataaaggcgagtccggagcacccggtgttcctggtatagctggacccaggggtggtcccggtgaaagaggtgaacagggcccaccgggtcccgccggtttccctggcgcccctggtcaaaatggagaaccaggtgcaaagggcgagagaggagccccaggagaaaagggtgagggaggaccacccggtgctgccggtccagctgggggttcaggtcctgctggaccaccaggtccacagggcgttaaaggtgagagaggaagtccaggtggtcctggagctgctggattcccaggtggccgtggacctcctggtccccctggatcgaatggtaatcctggtccgccaggtagttcgggtgctcctgggaaggacggtccacctggccccccaggtagtaacggtgcacctggtagtccaggtatatccggacctaaaggagattccggtccaccaggcgaaagaggggccccaggcccacagggtccaccaggagcccccggtcctctgggtattgctggtcttactggtgcacgtggactggccggtccacccggaatgcctggagcaagaggttcacctggaccacaaggtattaaaggagagaacggtaaacctggaccttccggtcaaaacggagagcggggacccccaggcccccaaggtctgccaggactagctggtaccgcaggggaaccaggaagagatggaaatccaggttcagacggactacccggtagagatggtgcaccgggggccaagggcgacaggggtgagaatggatctcctggtgcgccaggggcaccaggccacccaggtcccccaggtcctgtgggccctgctggaaagtcaggtgacaggggagagacaggcccggctggtccatctggcgcacccggaccagctggttccagaggcccacctggtccgcaaggccctagaggtgacaagggagagactggagaacgaggtgctatgggtatcaagggtcatagaggttttccgggtaatcccggcgccccaggttctcctggtccagctggccatcaaggtgcagtcggatcgcccggcccagccggtcccaggggccctgttggtccatccggtcctccaggaaaggatggtgcttctggacacccaggacctatcggacctccgggtcctagaggtaatagaggagaacgtggatccgagggtagtcctggtcaccctggtcaacctggcccaccagggcctccaggtgcacccggtccatgttgtggtgcaggcggtgtggctgcaattgctggtgtgggtgctgaaaaggccggcggtttcgctccatattatggtgatgaaccgattgattttaagatcaatactgacgaaatcatgacttccttaaagtccgttaatggtcaaattgagtctctaatctccccagatggttcacgtaaaaatcctgctagaaattgtagagatttgaagttttgtcaccccgagttgcagtccggtgagtactgggtggaccccaatcaaggttgtaagttagacgctattaaagtttactgcaatatggagacaggagaaacttgcatcagcgcttaatcaagaggatgtcagaatgccatttgcctgagagatgcaggcttcatttttgatacttttttatttgtaacctatatagtataggattttttttgtcattttgtttcttctcgtacgagcttgctcctgatcagcctatctcgcagctgatgaatatcttgtggtaggggtttgggaaaatcattcgagtttgatgtttttcttggtatttcccactcctcttcagagtacagaagattaagtgagacgttcgtttgtgctccggaggatccttcagtaatgtcttgtttcttttgttgcagtggtgagccattttgacttcgtgaaagtttctttagaatagttgtttccagaggccaaacattccacccgtagtaaagtgcaagcgtaggaagaccaagactggcataaatcaggtataagtgtcgagcactggcaggtgatcttctgaaagtttctactagcagataagatccagtagtcatgcatatggcaacaatgtaccgtgtggatctaagaacgcgtcctactaaccttcgcattcgttggtccagtttgttgttatcgatcaacgtgacaaggttgtcgattccgcgtaagcatgcatacccaaggacgcctgttgcaattccaagtgagccagttccaacaatctttgtaatattagagcacttcattgtgttgcgcttgaaagtaaaatgcgaacaaattaagagataatctcgaaaccgcgacttcaaacgccaatatgatgtgcggcacacaataagcgttcatatccgctgggtgactttctcgctttaaaaaattatccgaaaaaattttctagagtgttgttactttatacttccggctcgtataatacgacaaggtgtaaggaggactaaaccatggctaaactcacctctgctgttccagtcctgactgctcgtgatgttgctggtgctgttgagttctggactgataggctcggtttctcccgtgacttcgtagaggacgactttgccggtgttgtacgtgacgacgttaccctgttcatctccgcagttcaggaccaggttgtgccagacaacactctggcatgggtatgggttcgtggtctggacgaactgtacgctgagtggtctgaggtcgtgtctaccaacttccgtgatgcatctggtccagctatgaccgagatcggtgaacagccctggggtcgtgagtttgcactgcgtgatccagctggtaactgcgtgcatttcgtcgcagaagagcaggactaacaattgacaccttacgattatttagagagtatttattagttttattgtatgtatacggatgttttattatctatttatgcccttatattctgtaactatccaaaagtcctatcttatcaagccagcaatctatgtccgcgaacgtcaactaaaaataagctttttatgctcttctctctttttttcccttcggtataattataccttgcatccacagattctcctgccaaattttgcataatcctttacaacatggctatatgggagcacttagcgccctccaaaacccatattgcctacgcatgtataggtgttttttccacaatattttctctgtgctctctttttatta

SEQ ID NO: 985 - DNA, 6420 bp, Artificial Sequence
  Primer
caggtcctgaaggtggtaaaggtgctgctggtccaccgggaccgcctggcgccgctggtactcctggcttgcagggaatgccaggagagagaggtggattaggaagccccggtccgaagggtgataaaggggagccaggaggacctggtgctgacggcgttcctggtaaagacggaccaaggggaccaacgggtccaatcggaccaccaggacccgctggccagccaggagataaaggcgagggaggagcacccggtttacctggtatagctggacccaggggttcccccggtgaaagaggtgaaacaggcccaccgggtcccgccggtttccctggcgcccctggtcaaaatggagaaccaggtggcaagggcgagagaggagccccaggagaaaagggtgagggaggaccacccggtgtcgccggtccacctgggggttcaggtcctgctggaccaccaggtccacagggcgttaaaggtgagagaggaagtccaggtggtcctggagctgctggattcccaggtgctcgtggacttcctggtccccctggatcgaatggtaatcctggtccgccaggtccatcgggtagccctgggaaggacggtccacctggccccgctggtaacacaggtgcacctggtagtccaggtgtgtccggacctaaaggagatgctggtcagccaggcgaaaaagggagcccaggcgcacagggtccaccaggagcccccggtcctctgggtattgctggtattactggtgcacgtggactggccggtccacccggaatgcctggacctagaggttcacctggaccacaaggtgtcaaaggagagagcggtaaacctggagccaacggtctttcaggagagcggggacccccaggcccccaaggtctgccaggactagctggtaccgcaggggaaccaggaagagatggaaatccaggttcagacggactacccggtagagatggtagcccggggggaaagggcgacaggggtgagaatggatctcctggtgcgccaggggcaccaggccacccaggtcccccaggtcctgtgggccctgctggaaagtcaggtgacaggggagagagcggcccggctggtccagccggcgcacccggaccagctggttccagaggcgcacctggtccgcaaggccctagaggtgacaagggagagactggagaacgaggtgctgctggtatcaagggtcatagaggttttccgggtaatcccggcgccccaggttctcctggtccagctggccagcaaggtgcaattggatcgcccggcccagccggtcccaggggccctgttggtccatccggtcctccaggaaaggatggtacatctggacacccaggacctatcggacctccgggtcctagaggtaatagaggagaacgtggatccgagggtagtcctggtcaccctggtcaacctggcccaccagggcctccaggtgcacccggtccatgttgtggtggagttggtgccgctgcaattgctggtattggtggtgaaaaggcctaatcaagaggatgtcagaatgccatttgcctgagagatgcaggcttcatttttgatacttttttatttgtaacctatatagtataggattttttttgtcattttgtttcttctcgtacgagcttgctcctgatcagcctatctcgcagctgatgaatatcttgtggtaggggtttgggaaaatcattcgagtttgatgtttttcttggtatttcccactcctcttcagagtacagaagattaagtgagacgttcgtttgtgctccggaggatccttcagtaatgtcttgtttcttttgttgcagtggtgagccattttgacttcgtgaaagtttctttagaatagttgtttccagaggccaaacattccacccgtagtaaagtgcaagcgtaggaagaccaagactggcataaatcaggtataagtgtcgagcactggcaggtgatcttctgaaagtttctactagcagataagatccagtagtcatgcatatggcaacaatgtaccgtgtggatctaagaacgcgtcctactaaccttcgcattcgttggtccagtttgttgttatcgatcaacgtgacaaggttgtcgattccgcgtaagcatgcatacccaaggacgcctgttgcaattccaagtgagccagttccaacaatctttgtaatattagagcacttcattgtgttgcgcttgaaagtaaaatgcgaacaaattaagagataatctcgaaaccgcgacttcaaacgccaatatgatgtgcggcacacaataagcgttcatatccgctgggtgactttctcgctttaaaaaattatccgaaaaaattttctagagtgttgttactttatacttccggctcgtataatacgacaaggtgtaaggaggactaaaccatggctaaactcacctctgctgttccagtcctgactgctcgtgatgttgctggtgctgttgagttctggactgataggctcggtttctcccgtgacttcgtagaggacgactttgccggtgttgtacgtgacgacgttaccctgttcatctccgcagttcaggaccaggttgtgccagacaacactctggcatgggtatgggttcgtggtctggacgaactgtacgctgagtggtctgaggtcgtgtctaccaacttccgtgatgcatctggtccagctatgaccgagatcggtgaacagccctggggtcgtgagtttgcactgcgtgatccagctggtaactgcgtgcatttcgtcgcagaagagcaggactaacaattgacaccttacgattatttagagagtatttattagttttattgtatgtatacggatgttttattatctatttatgcccttatattctgtaactatccaaaagtcctatcttatcaagccagcaatctatgtccgcgaacgtcaactaaaaataagctttttatgctcttctctctttttttcccttcggtataattataccttgcatccacagattctcctgccaaattttgcataatcctttacaacatggctatatgggagcacttagcgccctccaaaacccatattgcctacgcatgtataggtgttttttccacaatattttctctgtgctctctttttattaaagagaagctctatatcggagaagcttctgtggccgttatattcggccttatcgtgggaccacattgcctgaattggtttgccccggaagattggggaaacttggatctgattaccttagctgcagaaaagggtaccactgagcgtcagaccccgtagaaaagatcaaaggatcttcttgagatcctttttttctgcgcgtaatctgctgcttgcaaacaaaaaaaccaccgctaccagcggtggtttgtttgccggatcaagagctaccaactctttttccgaaggtaactggcttcagcagagcgcagataccaaatactgttcttctagtgtagccgtagttaggccaccacttcaagaactctgtagcaccgcctacatacctcgctctgctaatcctgttaccagtggctgctgccagtggcgataagtcgtgtcttaccgggttggacccaagacgatagttaccggataaggcgcagcggtcgggctgaacggggggttcgtgcacacagcccagcttggagcgaacgacctacaccgaactgagatacctacagcgtgagctatgagaaagcgccacgcttcccgaagggagaaaggcggacaggtatccggtaagcggcagggtcggaacaggagagcgcacgagggagcttccagggggaaacgcctggtatctttatagtcctgtcgggtttcgccacctctgacttgagcgtcgatttttgtgatgctcgtcaggggggcggagcctatggaaaaacgccagcaacgcggcctttttacggttcctggccttttgctggccttttgctcacatgtatttaaataatgtatctaaacgcaaactccgagctggaaaaatgttaccggcgatgcgcggacaatttagaggcggcgatcaagaaacacctgctgggcgagcagtctggagcacagtcttcgatgggcccgagatcccaccgcgttcctgggtaccgggacgtgaggcagcgcgacatccatcaaatataccaggcgccaaccgagtgtctcggaaaacagcttctggatatcttccgctggcggcgcaacgacgaataatagtccctggaggtgacggaatatatatgtgtggagggtaaatctgacagggtgtagcaaaggtaatattttcctaaaacatgcaatcggctgccccgcaacgggaaaaagaatgactttggcactcttcaccagagtggggtgtcccgctcgtgtgtgcaaataggctcccactggtcaccccggattttgcagaaaaacagcaagttccggggtgtctcactggtgtccgccaataagaggagccggcaggcacggagtttacatcaagctgtctccgatacactcgactaccatccgggtctctcagagaggggaatggcactataaataccgcctccttgcgctctctgccttcatcaatcaaatcatgtacaggaacttaataattgctactgcccttacttgcggtgcatacagtgcctacgtgccttccgaaccatggagcacactgacacctgatgctagccttgaaagtgccctcaaagattactcacaaacttttggaatagctattaagtccttagatgccgacaagattaagagagacgtcaaatctggtgttgctgttggaggtttagcaggctaccctggtcccgcagggcccccaggtccgccgggtccgcccggaacatcaggtcatcccggaagccctggttcaccaggttatcagggaccgcccggagagcctggacaagctggtccctccggaccccctggtccaccaggtgctattggaccaagtggtcctgccggaaaagacggtgaatccggtagacctggtagacccggcgaaaggggtttaccaggtcctcccggaattaagggtccagccggtatacccggttttcctgggatgaagggtcacagaggatttgatggtagaaacggagagaaaggcgaaaccggtgctcccggactgaagggtgaaaacggtcttcctggtgagaacggcgctcctggacctatgggtccacgtggtgctccaggagaaagaggcagaccaggattgcctggtgcagctggtgctagaggtaacgatggtgcccgtggttccgatggacaacccgggccacccggccctccaggtaccgctggatttcctggaagccctggtgctaagggggaggttggtccggctggtagtcccggaagtaacggtgccccaggtcaaagaggcgaaccaggccctcagggtcacgcaggagcacagggaccgcctggtcctcctggtattaatggttcgcctggaggaaaaggtgaaatggggcccgcaggaatccccggtgcgcctggtcttatgggtgccaggggtcctccaggcccggccggtgcaaatggtgctcccggattacgaggaggagctggtgaacctggtaaaaacggtgccaaaggagaaccaggtcctcgtggagagcgtggtgaagctggcattcccggtgtgcctggtgcaaaaggtgaggacggtaaggacggttcccctggtgagccaggtgcgaacggactgccaggtgcagccggagagcgaggagctccaggattcaggggaccagccggtcctaacggcattcctggtgaaaaagggcccgccggtgaaaggggagctcccggtccagcaggccctcgtggagcagctggtgagcctggacgtgacggtgtcccaggagggccaggtatgaggggtatgcccgggtcccctggcggtcctggatcggatggaaaaccagggccaccaggttcgcagggtgaaagcggacgtccaggcccacccggcccttcaggtccaaggggtcagcctggtgtcatgggtttccccggtccaaagggtaatgacggagcaccgggtaaaaatggtgaacgtggtggcccaggtggtccaggaccccaaggtccaccaggaaaaaacggtgagacaggtcctcaaggacctccaggacctaccggtcctggaggagataagggagatacgggaccgccaggacctcaaggattgcaaggtttgcctggtacaggaggccctcccggagaaaatggtaagcctggagagccaggaccaaaaggcgatgctggagccccaggtgcacccggaggtaagggagacgccggtgctccgggtgagcgtggtcctccgggtttagctggtgcacctggattgagaggtggtgccgggccgc

SEQ ID NO: 986 - protein, 546 aa, Artificial Sequence
  Collagen Fragment
DVKSGVAVGGLAGYPGPAGPPGPPGPPGTSGHPGSPGSPGYQGPPGEPGQAGPSGPPGPPGAIGPSGPAGKDGESGRPGRPGERGLPGPPGIKGPAGIPGFPGMKGHRGFDGRNGEKGETGAPGLKGENGLPGENGAPGPMGPRGAPGERGRPGLPGAAGARGNDGARGSDGQPGPPGPPGTAGFPGSPGAKGEVGPAGSPGSNGAPGQRGEPGPQGHAGAQGPPGPPGINGSPGGKGEMGPAGIPGAPGLMGARGPPGPAGANGAPGLRGGAGEPGKNGAKGEPGPRGERGEAGIPGVPGAKGEDGKDGSPGEPGANGLPGAAGERGAPGFRGPAGPNGIPGEKGPAGERGAPGPAGPRGAAGEPGRDGVPGGPGMRGMPGSPGGPGSDGKPGPPGSQGESGRPGPPGPSGPRGQPGVMGFPGPKGNDGAPGKNGERGGPGGPGPQGPPGKNGETGPQGPPGPTGPGGDKGDTGPPGPQGLQGLPGTGGPPGENGKPGEPGPKGDAGAPGAPGGKGDAGAPGERGPPAIAGIGGEKAGGFAPYYG

SEQ ID NO: 987 - protein, 546 aa, Artificial Sequence; identical to SEQ ID NO: 986
  Collagen fragment

SEQ ID NO: 988 - protein, 546 aa, Artificial Sequence
  Collagen fragment
DVKSGVAVGGLAGYPGPAGAPGPPGPPGASGHPGSPGAPGYQGPPGAPGQAGPSGAPGPPGAIGASGPAGKDGASGRPGRPGERGLPGPPGAKGPAGIPGAPGMKGHRGFDGRNGEKGATGAPGLKGANGLPGENGAPGPMGPRGAPGERGRPGAPGAAGARGADGARGSDGAPGPPGPPGAAGFPGSPGAKGEVGPAGAPGSNGAPGARGEPGPQGAAGAQGPPGAPGINGSPGAKGEMGPAGAPGAPGLMGARGPPGPAGANGAPGLRGAAGEPGKNGAKGEPGPRGARGEAGIPGAPGAKGEDGADGSPGEPGANGLPGAAGARGAPGFRGAAGPNGIPGAKGPAGERGAPGPAGPRGAAGEPGRDGAPGGPGMRGAPGSPGGPGADGKPGPPGAQGESGRPGAPGPSGPRGAPGVMGFPGAKGNDGAPGANGERGGPGAPGPQGPPGANGETGPQGAPGPTGPGGAKGDTGPPGAQGLQGLPGAGGPPGENGAPGEPGPKGAAGAPGAPGAKGDAGAPGERGPPAIAGIGGEKAGGFAPYYG

SEQ ID NO: 989 - protein, 546 aa, Artificial Sequence
  Collagen fragment
DVKSGVAVGGLAGYPGPAGPPGPPGPPGTSGHPGSPGSPGYQGPPGEPGQAGPSGPPGPPGAIGPSGPAGKDGESGRPGRPGERGLPGPPGIKGPAGIPGFPGMKGHRGFDGRNGEKGETGAPGLKGENGLPGENGAPGPMGPRGAPGERGRPGLPGAAGARGNDGARGSDGQPGPPGPPGTAGFPGSPGAKGEVGPAGSPGSNGAPGQRGEPGPQGHAGAQGPPGPPGINGSPGGKGEMGPAGIPGAPGLMGARGPPGPAGANGAPGLRGGAGEPGKNGAKGEPGPRGERGEAGIPGVPGAKGEDGKDGSPGEPGANGLPGAAGERGAPGFRGPAGPNGIPGEKGPAGERGAPGPAGPRGAAGEPGRDGEPGLMGPRGLPGSPGGPGPAGKEGPVGLPGIDGRPGPIGPAGARGEPGVMGFPGPKGNDGDPGKNGDKGHAGLAGARGAPGPDGETGAQGPPGPQGVQGGKGEQGPAGPPGFQGLPGTGGPAGEVGKPGEQGLHGEFGLPGPAGPRGERGAPGERGPPAIAGIGGEKAGGFAPYYG

SEQ ID NO: 990 - protein, 546 aa, Artificial Sequence
  Collagen fragment
DVKSGVAVGGLAGYPGPAGPPGPPGPPGTSGHPGSPGSPGYQGPPGEPGQAGPSGPPGPPGAIGPSGPAGKRGESGRPGRPGERGLPGPPGIKGPAGIPGFPGMKGHRGFRGRNGEKGETGAPGLKGENGLPGENGAPGPMGPRGAPGERGRPGLPGAAGARGNRGARGSDGQPGPPGPPGTAGFPGSPGAKGRVGPAGSPGSNGAPGQRGEPGPQGHAGAQGPPGPPGINGSPGGKGEMGPAGIPGAPGLMGARGPPGPAGANGAPGLRGGAGRPGKNGAKGEPGPRGERGRAGIPGVPGAKGERGKDGSPGEPGANGLPGAAGERGAPGFRGPAGPNGIPGEKGPAGERGAPGPAGPRGAAGEPGRRGVPGGPGMRGMPGSPGGPGSRGKPGPPGSQGESGRPGPPGPSGPRGQPGVMGFPGPKGNDGAPGKNGERGGPGGPGPQGPPGKNGETGPQGPPGPTGPGGRKGDTGPPGPQGLQGLPGTGGPPGENGKPGRPGPKGDAGAPGAPGGKGRAGAPGERGPPAIAGIGGEKAGGFAPYYG

SEQ ID NO: 991 - protein, 546 aa, Artificial Sequence
  Collagen fragment
DVKSGVAVGGLAGYPGPAGPPGPPGPPGASGHPGSPGSPGYQGPPGEPGQAGPAGPPGPPGAIGPSGPAGKDGESGRPGRPGERGLPGPPGIKGPAGIPGFPGMKGHRGFDGRNGEKGEAGAPGLKGENGLPGENGAPGPMGPRGAPGERGRPGLPGAAGARGNDGARGSDGQPGPPGPPGAAGFPGAPGAKGEVGPAGSPGSNGAPGQRGEPGPQGHAGAQGPPGPPGINGSPGGKGEMGPAGIPGAPGLMGARGPPGPAGANGAPGLRGGAGEPGKNGAKGEPGPRGERGEAGIPGVPGAKGEDGKDGSPGEPGANGLPGAAGERGAPGFRGPAGPNGIPGEKGPAGERGAPGPAGPRGAAGEPGRDGVPGGPGMRGMPGSPGGPGSDGKPGPPGAQGESGRPGPPGPSGPRGQPGVMGFPGPKGNDGAPGKNGERGGPGGPGPQGPPGKNGETGPQGPPGPTGPGGDKGDTGPPGPQGLQGLPGTGGPPGENGKPGEPGPKGDAGAPGAPGGKGDAGAPGERGPPAIAGIGGEKAGGFAPYYG

SEQ ID NO: 992 - protein, 546 aa, Artificial Sequence
  Collagen fragment
DVKSGVAVGGLAGYPGPAGPPGPPGPPGNSGHPGSPGSPGYQGPPGEPGQAGPNGPPGPPGAIGPSGPAGKDGESGRPGRPGERGLPGPPGIKGPAGIPGFPGMKGHRGFDGRNGEKGENGAPGLKGENGLPGENGAPGPMGPRGAPGERGRPGLPGAAGARGNDGARGSDGQPGPPGPPGNAGFPGNPGAKGEVGPAGSPGSNGAPGQRGEPGPQGHAGAQGPPGPPGINGSPGGKGEMGPAGIPGAPGLMGARGPPGPAGANGAPGLRGGAGEPGKNGAKGEPGPRGERGEAGIPGVPGAKGEDGKDGSPGEPGANGLPGAAGERGAPGFRGPAGPNGIPGEKGPAGERGAPGPAGPRGAAGEPGRDGVPGGPGMRGMPGSPGGPGSDGKPGPPGNQGESGRPGPPGPSGPRGQPGVMGFPGPKGNDGAPGKNGERGGPGGPGPQGPPGKNGETGPQGPPGPTGPGGDKGDTGPPGPQGLQGLPGTGGPPGENGKPGEPGPKGDAGAPGAPGGKGDAGAPGERGPPAIAGIGGEKAGGFAPYYG

SEQ ID NO: 993 - protein, 546 aa, Artificial Sequence; identical to SEQ ID NO: 988
  Collagen fragment

SEQ ID NO: 994 - protein, 549 aa, Artificial Sequence
  Collagen fragment
DSYDVKSGVAVGGLAGYPGPAGPPGPPGPPGTSGHPGSPGSPGYQGPPGEPGQAGPSGPPGPPGAIGPSGPAGKDGESGRPGRPGERGLPGPPGIKGPAGIPGFPGMKGHRGFDGRNGEKGETGAPGLKGENGLPGENGAPGPMGPRGAPGERGRPGLPGAAGARGNDGARGSDGQPGPPGPPGTAGFPGSPGAKGEVGPAGSPGSNGAPGQRGEPGPQGHAGAQGPPGPPGINGSPGGKGEMGPAGIPGAPGLMGARGPPGPAGANGAPGLRGGAGEPGKNGAKGEPGPRGERGEAGIPGVPGAKGEDGKDGSPGEPGANGLPGAAGERGAPGFRGPAGPNGIPGEKGPAGERGAPGPAGPRGAAGEPGRDGVPGGPGMRGMPGSPGGPGSDGKPGPPGSQGESGRPGPPGPSGPRGQPGVMGFPGPKGNDGAPGKNGERGGPGGPGPQGPPGKNGETGPQGPPGPTGPGGDKGDTGPPGPQGLQGLPGTGGPPGENGKPGEPGPKGDAGAPGAPGGKGDAGAPGERGPPAIAGIGGEKAGGFAPYYG

SEQ ID NO: 995 - protein, 318 aa, Artificial Sequence
  Collagen fragment
DVKSGVAVGGLAGYPGPAGPPGPPGPPGTSGHPGSPGSPGYQGPPGEPGQAGPSGPPGPPGAIGPSGPAGKDGESGRPGRPGERGLPGPPGIKGPAGIPGFPGMKGHRGFDGRNGEKGETGAPGLKGENGLPGENGAPGPMGPRGAPGERGRPGLPGAAGARGNDGARGSDGQPGPPGPPGAIGPSGPAGKDGESGRPGRPGERGLPGPPGIKGPAGIPGFPGMKGHRGFDGRNGEKGETGAPGLKGENGLPGENGAPGPMGPRGAPGERGRPGLPGAAGARGNDGARGSDGQPGPPGPPAIAGIGGEKAGGFAPYYG

SEQ ID NO: 996 - protein, 318 aa, Artificial Sequence; identical to SEQ ID NO: 995
  Collagen fragment

SEQ ID NO: 997 - protein, 438 aa, Artificial Sequence
  Collagen fragment
DVKSGVAVGGLAGYPGPAGPPGPPGPPGTSGHPGSPGSPGYQGPPGEPGQAGPSGPPGPPGAIGPSGPAGKDGESGRPGRPGERGLPGPPGIKGPAGIPGFPGMKGHRGFDGRNGEKGETGAPGLKGENGLPGENGAPGPMGPRGAPGERGRPGLPGAAGARGNDGARGSDGQPGPPGPPGAIGPSGPAGKDGESGRPGRPGERGLPGPPGIKGPAGIPGFPGMKGHRGFDGRNGEKGETGAPGLKGENGLPGENGAPGPMGPRGAPGERGRPGLPGAAGARGNDGARGSDGQPGPPGPPGAIGPSGPAGKDGESGRPGRPGERGLPGPPGIKGPAGIPGFPGMKGHRGFDGRNGEKGETGAPGLKGENGLPGENGAPGPMGPRGAPGERGRPGLPGAAGARGNDGARGSDGQPGPPGPPAIAGIGGEKAGGFAPYYG

SEQ ID NO: 998 - protein, 546 aa, Artificial Sequence
  Collagen fragment
DVKSGVAVGGLAGYPGPAGPPGPPGPPGTSGHPGSPGSPGYQGPPGEPGQAGPSGPPGPPGAIGPSGPAGKDGESGRPGRPGERGLPGPPGIKGPAGIPGFPGMKGHRGFDGRNGEKGETGAPGLKGENGLPGENGAPGPMGPRGAPGERGRPGLPGAAGARGNDGARGSDGQPGPPGPPGTAGFPGSPGAKGEVGPAGSPGSNGAPGQRGEPGPQGHAGAQGPPGPPGINGSPGGKGEMGPAGIPGAPGLMGARGPPGPAGANGAPGLRGGAGEPGKNGAKGEPGPRGERGEAGIPGVPGAKGEDGKDGSPGEPGANGLPGAAGERGAPGFRGPAGPNGIPGEKGPAGERGAPGPAGPRGAAGEPGRDGVPGGPGMRGMPGSPGGPGSDGKPGPPGSQGESGRPGPPGPSGPRGQPGVMGFPGPKGHRGFPGKNGERGGPGGPGPQGPPGKNGETGPQGPPGPTGPGGDKGDTGPPGPQGLQGLPGTGGPPGENGKPGEPGPKGDAGAPGAPGGKGDAGAPGERGPPAIAGIGGEKAGGFAPYYG

SEQ ID NO: 999 - protein, 556 aa, Artificial Sequence
  Collagen fragment
DVKSGVAVGGLAGYPGPAGPPGPPGPPGTSGHPGSPGSPGYQGPPGEPGQAGPSGPPGPPGAIGPSGPAGKDGESGRPGRPGAAGLPGPPGIKGPAGIPGFPGMKGHRGFDGRNGEKGETGAPGLKGENGLPGAAGAPGPMGPRGAPGAAGRPGLPGAAGARGNDGARGSDGQPGPPGPPGTAGFPGSPGAKGEVGPAGSPGSNGAPGQRGEPGPQGHAGAQGPPGPPGINGSPGGKGEMGPAGIPGAPGLMGARGPPGPAGANGAPGLRGGAGEPGKNGAKGEPGPRGERGEAGIPGVPGAKGEDGKDGSPGEPGANGLPGAAGERGAPGFRGPAGPNGIPGEKGPAGERGAPGPAGPRGAAGEPGRDGVPGGPGMRGMPGSPGGPGSDGKPGPPGSQGESGRPGPPGPSGPRGQPGVMGFPGPKGNDGAPGKNGERGGPGGPGPQGPPGKNGETGPQGPPGPTGPGGDKGDTGPPGPQGLQGLPGTGGPPGENGKPGEPGPKGDAGAPGAPGGKGDAGAPGPLVLRQLLVLVEKRPAVSLHIMVNQEDVRMPFA

SEQ ID NO: 1000 - protein, 546 aa, Artificial Sequence
  Collagen fragment
DVKSGVAVGGLAGYPGPAGPPGPPGPPGTSGHPGSPGSPGYQGPPGEPGQAGPSGPPGPPGAIGPSGPAGKDGESGKPGRPGERGLPGPPGIKGPAGIPGFPGMKGHRGFDGKNGEKGETGAPGLKGENGLPGENGAPGPMGPKGAPGERGKPGLPGAAGAKGNDGAKGSDGQPGPPGPPGTAGFPGSPGAKGEVGPAGSPGSNGAPGQKGEPGPQGHAGAQGPPGPPGINGSPGGKGEMGPAGIPGAPGLMGAKGPPGPAGANGAPGLKGGAGEPGKNGAKGEPGPKGEKGEAGIPGVPGAKGEDGKDGSPGEPGANGLPGAAGEKGAPGFKGPAGPNGIPGEKGPAGEKGAPGPAGPKGAAGEPGKDGVPGGPGMKGMPGSPGGPGSDGKPGPPGSQGESGKPGPPGPSGPKGQPGVMGFPGPKGNDGAPGKNGEKGGPGGPGPQGPPGKNGETGPQGPPGPTGPGGDKGDTGPPGPQGLQGLPGTGGPPGENGKPGEPGPKGDAGAPGAPGGKGDAGAPGERGPPAIAGIGGEKAGGFAPYYG

SEQ ID NO: 1001 - protein, 546 aa, Artificial Sequence
  Collagen fragment
DVKSGVAVGGLAGYPGPAGPPGPPGPPGTSGHPGSPGSPGYQGPPGEPGQAGPSGPPGPPGAIGPSGPAGKDGESGRPGRPGERGLPGPPGIKGPAGIPGFPGMKGHRGFDGRNGEKGETGAPGLKGENGLPGENGAPGPMGPRGAPGERGRPGLPGAAGARGNDGARGSDGQPGPPGPPGTAGFPGAVGAKGEAGPQGPRGSEGPQGVRGEPGPPGPAGAAGPAGPPGADGQPGAKGAMGAPGIAGAPGFPGARGPPGPQGAGGPPGPKGGAGEPGAPGAKGDTGAKGERGPVGVQGPPGPAGEEGKRGARGEPGPTGLPGPPGERGGPGFRGFPGADGIPGEKGPAGERGAPGPAGPRGAAGEPGRDGVPGGPGMRGMPGSPGGPGSDGKPGPPGSQGESGRPGPPGPSGPRGQPGVMGFPGPKGNDGAPGKNGERGGPGGPGPQGPPGKNGETGPQGPPGPTGPGGDKGDTGPPGPQGLQGLPGTGGPPGENGKPGEPGPKGDAGAPGAPGGKGDAGAPGERGPPAIAGIGGEKAGGFAPYYG

SEQ ID NO: 1002 - protein, 546 aa, Artificial Sequence
  Collagen fragment
DVKSGVAVGGIAGYPGPAGPPGPPGPPGTSGHPGSPGSPGYQGPPGEPGQAGPSGPPGPPGALGPSGPAGKDGESGRPGRPGERGVPGPPGVKGPAGLPGFPGMKGHRGFDGRNGEKGETGAPGLKGENGLPGENGAPGPMGPRGAPGERGRPGLPGAAGARGNDGARGSDGQPGPPGPPGTAGFPGSPGAKGELGPAGSPGSNGAPGQRGEPGPQGHAGAQGPPGPPGLNGSPGGKGEMGPAGVPGAPGIMGARGPPGPAGANGAPGIRGGAGEPGKNGAKGEPGPRGERGEAGLPGLPGAKGEDGKDGSPGEPGANGVPGAAGERGAPGFRGPAGPNGLPGEKGPAGERGAPGPAGPRGAAGEPGRDGIPGGPGMRGMPGSPGGPGSDGKPGPPGSQGESGRPGPPGPSGPRGQPGLMGFPGPKGNDGAPGKNGERGGPGGPGPQGPPGKNGETGPQGPPGPTGPGGDKGDTGPPGPQGVQGLPGTGGPPGENGKPGEPGPKGDAGAPGAPGGKGDAGAPGERGPPAIAGIGGEKAGGFAPYYG

SEQ ID NO: 1003 - protein, 546 aa, Artificial Sequence
  Collagen fragment
DVKSGVAVGGLAGYPGPAGPPGPPGPPGAAGHPGAPGAPGYQGPPGEPGQAGPAGPPGPPGAIGPAGPAGKDGEAGRPGRPGERGLPGPPGIKGPAGIPGFPGMKGHRGFDGRDGEKGEAGAPGLKGEDGLPGENGAPGPMGPRGAPGERGRPGLPGAAGARGDDGARGADGQPGPPGPPGAAGFPGAPGAKGEVGPAGAPGADGAPGQRGEPGPQGHAGAQGPPGPPGIDGAPGGKGEMGPAGIPGAPGLMGARGPPGPAGADGAPGLRGGAGEPGKDGAKGEPGPRGERGEAGIPGVPGAKGEDGKDGAPGEPGADGLPGAAGERGAPGFRGPAGPDGIPGEKGPAGERGAPGPAGPRGAAGEPGRDGVPGGPGMRGMPGAPGGPGADGKPGPPGAQGEAGRPGPPGPAGPRGQPGVMGFPGPKGDDGAPGKDGERGGPGGPGPQGPPGKDGEAGPQGPPGPAGPGGDKGDAGPPGPQGLQGLPGAGGPPGEDGKPGEPGPKGDAGAPGAPGGKGDAGAPGERGPPAIAGIGGEKAGGFAPYYG

SEQ ID NO: 1004 - protein, 546 aa, Artificial Sequence
  Collagen fragment
DVKSGVAVGGLAGYPGPAGPPGPPGPPGTSGHPGSPGSPGYQGPPGEPGQAGPSGPPGPPGAIGPSGPAGKDGESGRPGRPGERGLPGPPGIKGPAGIPGFPGMKGHRGFDGRNGEKGETGAPGLKGENGLPGENGAPGPMGPRGAPGERGRPGLPGAAGARGNDGARGSDGQPGPPGPPGTAGFPGSPGAKGEVGPAGSPGSNGAPGQRGEPGPQGHAGAQGPPGPPGINGSPGGKGEMGPAGIEPGRPEGEKGGGRGGAPGAPGRGAGNGEGARPPPLMGGAGGNKAGPLAAPIPGVPGAKGEDGKDGSPGEPGANGLPGAAGERGAPGFRGPAGPNGIPGEKGPAGERGAPGPAGPRGAAGEPGRDGVPGGPGMRGMPGSPGGPGSDGKPGPPGSQGESGRPGPPGPSGPRGQPGVMGFPGPKGNDGAPGKNGERGGPGGPGPQGPPGKNGETGPQGPPGPTGPGGDKGDTGPPGPQGLQGLPGTGGPPGENGKPGEPGPKGDAGAPGAPGGKGDAGAPGERGPPAIAGIGGEKAGGFAPYYG

SEQ ID NO: 1005 - protein, 546 aa, Artificial Sequence; identical to SEQ ID NO: 1004
  Collagen fragment

SEQ ID NO: 1006 - protein, 546 aa, Artificial Sequence
  Collagen fragment
DVKSGVAVGGLAGYPGPAGPPGPPGPPGTSGHPGSPGSPGYQGPPGEPGQAGPSGPPGPPGAIGPSGPAGKRGESGRPGRPGERGLPGPPGIKGPAGIPGFPGMKGHRGFRGRNGEKGRTGAPGLKGENGLPGENGAPGPMGPRGAPGERGRPGLPGAAGARGNRGARGSRGQPGPPGPPGTAGFPGSPGAKGRVGPAGSPGSNGAPGQRGRPGPQGHAGAQGPPGPPGINGSPGGKGRMGPAGIPGAPGLMGARGPPGPAGANGAPGLRGGAGRPGKNGAKGRPGPRGERGRAGIPGVPGAKGRRGKRGSPGEPGANGLPGAAGERGAPGFRGPAGPNGIPGEKGPAGERGAPGPAGPRGAAGRPGRRGVPGGPGMRGMPGSPGGPGSRGKPGPPGSQGESGRPGPPGPSGPRGQPGVMGFPGPKGNRGAPGKNGRRGGPGGPGPQGPPGKNGETGPQGPPGPTGPGGRKGRTGPPGPQGLQGLPGTGGPPGENGKPGRPGPKGDAGAPGAPGGKGRAGAPGERGPPAIAGIGGEKAGGFAPYYG

SEQ ID NO: 1007 - protein, 556 aa, Artificial Sequence
  Collagen fragment
DVKSGVAVGGMGGYPGPAGPPGPPGPPGVSGHPGAPGAPGYQGPPGEPGQAGPAGPPGPPGAMGPAGPAGKDGESGRPGRPGERGFPGPPGIKGPAGMPGFPGMKGHRGFDGRNGEKGDTGAPGLKGENGLPGENGAPGPMGPRGAPGERGRPGLPGAAGARGNDGARGSDGQPGPPGPPGTAGFPGSPGAKGEVGPAGAPGPNGAPGQRGEPGLQGQAGAPGPPGPPGINGSPGGKGEMGPAGIPGAPGLIGARGPPGPPGANGVPGQRGAAGEPGKNGAKGDPGARGERGEAGIPGIAGPKGEDGKDGSPGEPGANGLPGAPGERGPPGFRGAPGANGIPGEKGPPGERGGPGPAGPRGVAGEPGRDGLPGGPGLRGIPGSPGGPGSDGKPGPPGSQGESGRPGPPAHLVQGVSLVSWVSPVQRVMTEHRVKMVNVVAQVVQDCPVQQEKTVRQVLKDLQDLPVLQEIREMQDRQDLLDCKVCLVQEALPEKMVSLESQDQKAMSEPQVFPEVRETPVLRVSVVLRQLLVLVEKRPAVSLHIMVNQEDVRMPFA

SEQ ID NO: 1008 - protein, 546 aa, Artificial Sequence
  Collagen fragment
DVKSGVAVGGLAGYPGPAGPPGPPGPPGTSGHPGSPGSPGYQGPPGEPGQAGPSGPPGPPGAIGPSGPAGKDGESGRPGRPGERGLPGPPGIKGPAGIPGFPGMKGHRGFDGRNGEKGETGAPGLKGENGLPGENGAPGPMGPRGAPGERGRPGLPGAAGARGNDGARGSDGQPGPPGPPGTAGFPGSPGAKGEVGPAGSPGSNGAPGQRGEPGPQGHAGAQGPPGPPGINGSPGGKGEMGPAGIPGAPGLMGARGPPGPAGANGAPGLRGGAGEPGKNGAKGEPGPRGERGEAGIPGVPGAKGEDGKDGSPGEPGANGLPGAAGERGAPGFRGPAGPNGVAGPKGPAGERGAPGPAGPKGAAGEAGRPGEAGLPGAKGMPGSPGGPGPDGKPGPPGPAGQDGRPGPPGPPGARGQAGVMGFPGPKGAAGEPGKAGERGVPGPPGAVGPAGKDGEAGAQGPPGPAGPAGERGEQGPAGPQGFQGLPGPAGPPGEAGKPGEQGVPGDLGAPGAPGARGERGAPGERGPPAIAGIGGEKAGGFAPYYG

SEQ ID NO: 1009 - protein, 531 aa, Artificial Sequence
  Collagen fragment
DSYDVKSGVAVGGLAGYPGPAGPPGPPGPPGTSGHPGSPGSPGYQGPPGEPGQAGPSGPPGPPGAIGPSGPAGKDGESGRPGRPGERGLPGPPGIKGPAGIPGFPGMKGHRGFDGRNGEKGETGAPGLKGENGLPGENGAPGPMGPRGAPGERGRPGLPGAAGARGNDGARGSDGQPGPPGPPGTAGFPGSPGAKGEVGPAGSPGSNGAPGQRGEPGPQGHAGAQGPPGPPGINGSPGGKGEMGPAGIPGAPGLMGARGPPGPAGANGAPGLRGGAGEPGKNGAKGEPGPRGERGEAGIPGVPGAKGEDGKDGSPGEPGANGLPGAAGERGAPGFRGPAGPNGIPGEKGPAGERGAPGPAGPRGAAGEPGRDGVPGGPGMRGMPGSPGGPGSDGKPGPPGSQGESGRPGPPGPSGPRGQPGVMGFPGPKGNDGAPGKNGERGGPGGPGPQGPPGKNGETGPQGPPGPTGPGGDKGDTGPPGPQGLQGLPGTGGPPGENGKPGEPGPKGDAGAPGAPGGKGDAGAPGERGPP

SEQ ID NO: 1010 - protein, 556 aa, Artificial Sequence
  Collagen fragment
DVKSGVAVGKTTKSGLAGYPGPAGPPGPPGPPGTSGHPGSPGSPGYQGPPGEPGQAGPSGPPGPPGAIGPSGPAGKDGESGRPGRPGERGLPGPPGIKGPAGIPGFPGMKGHRGFDGRNGEKGETGAPGLKGENGLPGENGAPGPMGPRGAPGERGRPGLPGAAGARGNDGARGSDGQPGPPGPPGTAGFPGSPGAKGEVGPAGSPGSNGAPGQRGEPGPQGHAGAQGPPGPPGINGSPGGKGEMGPAGIPGAPGLMGARGPPGPAGANGAPGLRGGAGEPGKNGAKGEPGPRGERGEAGIPGVPGAKGEDGKDGSPGEPGANGLPGAAGERGAPGFRGPAGPNGIPGEKGPAGERGAPGPAGPRGAAGEPGRDGVPGGPGMRGMPGSPGGPGSDGKPGPPGSQGESGRPGPPGPSGPRGQPGVMGFPGPKGNDGAPGKNGERGGPGGPGPQGPPGKNGETGPQGPPGPTGPGGDKGDTGPPGPQGLQGLPGTGGPPGENGKPGEPGPKGDAGAPGAPGGKGDAGAPGERGPPKTTKSAIAGIGGEKAGGFAPYYG

SEQ ID NO: 1011 - protein, 556 aa, Artificial Sequence; identical to SEQ ID NO: 1010
  Collagen fragment

SEQ ID NO: 1012 - protein, 556 aa, Artificial Sequence
  Collagen fragment
DVKSGVAVGKTTKSGLAGYPGPAGPPGPPGPPGTSGHPGSPGSPGYQGPPGEPGQAGPSGPPGPPGAIGPSGPAGKDGESGRPGRPGAAGLPGPPGIKGPAGIPGFPGMKGHRGFDGRNGEKGETGAPGLKGENGLPGAAGAPGPMGPRGAPGAAGRPGLPGAAGARGNDGARGSDGQPGPPGPPGTAGFPGSPGAKGEVGPAGSPGSNGAPGQRGEPGPQGHAGAQGPPGPPGINGSPGGKGEMGPAGIPGAPGLMGARGPPGPAGANGAPGLRGGAGEPGKNGAKGEPGPRGERGEAGIPGVPGAKGEDGKDGSPGEPGANGLPGAAGERGAPGFRGPAGPNGIPGEKGPAGERGAPGPAGPRGAAGEPGRDGVPGGPGMRGMPGSPGGPGSDGKPGPPGSQGESGRPGPPGPSGPRGQPGVMGFPGPKGNDGAPGKNGERGGPGGPGPQGPPGKNGETGPQGPPGPTGPGGDKGDTGPPGPQGLQGLPGTGGPPGENGKPGEPGPKGDAGAPGAPGGKGDAGAPGAAGPPKTTKSAIAGIGGEKAGGFAPYYG

SEQ ID NO: 1013 - protein, 546 aa, Artificial Sequence
  Collagen fragment
DVKSGVAVGGLAGYPGPAGPPGPPGPPGTSGHPGSPGSPGYQGPPGEPGQAGPSGPPGPPGAIGPSGPAGKDGESGRPGRPGERGLPGPPGIKGPAGIPGFPGMKGHRGFDGRNGEKGETGAPGLKGENGLPGENGAPGPMGPRGAPGERGRPGLPGAAGARGNDGARGSDGQPGPPGPPGTAGFPGSPGAKGEVGPAGSPGSNGAPGQRGEPGPQGHAGAQGPPGPPGINGSPGGKGEMGPAGIPGAPGLMGARGPPGPAGANGAPGLRGGAGEPGKNGAKGEPGPRGERGEAGIPGVPGAKGEEGKRGARGEAGSAGPPGPPGLRGAPGFRGLPGADGRAGVMGPPGERGAPGPAGVRGAAGDAGRPGEPGLMGPRGLPGSPGGPGPAGKEGPVGLPGIDGRPGPIGPAGARGEPGVMGFPGPKGNDGDPGKNGDKGHAGLAGARGAPGPDGETGPQGPPGPTGPGGDKGDTGPPGPQGLQGLPGTGGPPGENGKPGEPGPKGDAGAPGAPGGKGDAGAPGERGPPAIAGIGGEKAGGFAPYYG

SEQ ID NO: 1014 - protein, 546 aa, Artificial Sequence
  Collagen fragment
DVKSGVAVGGMGGYPGPAGPPGPPGPPGVSGHPGAPGAPGYQGPPGEPGQAGPAGPPGPPGAMGPAGPAGKDGESGRPGRPGERGFPGPPGIKGPAGMPGFPGMKGHRGFDGRNGEKGDTGAPGLKGENGLPGENGAPGPMGPRGAPGERGRPGLPGAAGARGNDGARGSDGQPGPPGPPGTAGFPGSPGAKGEVGPAGAPGPNGAPGQRGEPGLQGQAGAPGPPGPPGINGSPGGKGEMGPAGIPGAPGLIGARGPPGPPGANGVPGQRGAAGEPGKNGAKGDPGARGERGEAGIPGIAGPKGEDGKDGSPGEPGANGLPGAPGERGPPGFRGAPGANGIPGEKGPPGERGGPGPAGPRGVAGEPGRDGLPGGPGLRGIPGSPGGPGSDGKPGPPGSQGESGRPGPPGSPGPRGQPGVMGFPGPKGNDGAPGKNGERGGPGGPGLPGPAGKNGETGPQGPPGPTGPAGDKGDAGPPGPPGLQGLPGTGGPPGENGKPGEPGPKGDVGAPGIPGGKGDAGAPGERGPPAIAGIGGEKAGGFAPYYG

SEQ ID NO: 1015 - protein, 546 aa, Artificial Sequence
  Collagen fragment
DVKSGVAVGGLAGYPGPAGPPGPPGPPGTSGHPGSPGSPGYQGPPGEPGQAGPAGPPGPIGNVGPSGPAGKDGESGRPGRPGERGLPGPPGIKGPAGIPGFPGMKGHRGFDGRNGEKGETGAPGLKGENGLPGENGAPGPMGPRGAPGERGRPGLPGAAGARGNDGARGSDGQPGPPGPPGTAGFPGSPGAKGEVGPAGSPGSNGAPGQRGEPGPQGHAGAQGPPGPPGINGSPGGKGEMGPAGIPGAPGLMGARGPPGPAGANGAPGLRGGAGEPGKNGAKGEPGPRGERGEAGIPGVPGAKGEDGKDGSPGEPGANGLPGAAGERGAPGFRGPAGPNGIPGEKGPAGERGAPGPAGPRGAAGEPGRDGVPGGPGMRGMPGSPGGPGSDGKPGPPGSQGESGRPGPPGPSGPRGQPGVMGFPGPKGNDGAPGKNGERGGPGGPGPQGPPGKNGETGPQGPPGPTGPGGDKGDTGPPGPQGLQGLPGTGGPPGENGKPGEPGPKGDAGAPGAPGGKGDAGAPGERGPPAIAGIGGEKAGGFAPYYG

SEQ ID NO: 1016 - DNA, 1638 bp, Artificial Sequence
  Collagen fragment
gacgtcaaatctggtgttgctgtcggaggacttgcaggatatccaggacctgccggaccacctggaccaccaggcccaccaggcacctcaggccatccaggctccccaggatcacctggatatcagggaccaccaggcgagccaggacaggccggcccaagtggaccacctggaccaccaggcgccataggcccttcaggcccagccggaaaagacggagagagtggccgtccaggaaggccaggagaaaggggactgccaggaccacctggcatcaaaggccctgccggaataccaggattcccaggcatgaaaggacatcgtggattcgacggaaggaatggagagaaaggcgagaccggcgccccaggactcaaaggcgagaatggcctgcctggagagaatggagccccaggaccaatgggccctcgtggagccccaggcgaaaggggacgtcctggactgccaggagccgcaggcgcccgtggcaatgacggcgccaggggaagtgacggccagcctggaccaccaggcccaccaggaacagctggattcccaggatccccaggcgccaaaggcgaggtaggaccagcaggatcaccaggcagtaatggcgctccaggacagcgtggagagccaggaccacaaggacatgccggcgcccagggcccaccaggaccaccaggaatcaatggcagtccaggcggcaaaggagagatgggcccagccggaatcccaggagccccaggattgatgggagctcgtggcccacctggacctgctggcgccaatggcgccccaggattgaggggcggcgcaggcgaaccaggcaaaaatggcgctaaaggagaaccaggacctcgaggcgagcgtggcgaagccggcatccctggcgtacctggagccaaaggagaggacggaaaagacggaagtccaggagagccaggcgcaaatggactgcctggagccgcaggagagcgtggcgctccaggattcaggggaccagccggacctaatggaatccctggagagaaaggcccagccggagaacgaggcgcccctggaccagcaggaccacgtggagccgccggagagccaggacgtgacggagtcccaggaggccctggaatgcgtggaatgccaggaagtcctggaggacctggaagtgacggaaaacctggaccaccaggaagtcagggagagagtggcaggcctggcccaccaggaccttcaggcccaaggggccaaccaggcgtcatgggattcccaggcccaaaaggaaatgacggcgccccaggcaaaaatggagagaggggcggaccaggaggaccaggaccacaaggcccaccaggaaaaaatggcgagacaggaccacaaggaccacctggaccaacaggaccaggcggcgacaaaggagacaccggaccaccaggccctcagggactccagggactgccaggcaccggcggcccacctggagagaatggaaaaccaggagagcctggccctaaaggcgacgctggcgcaccaggagcccctggaggaaaaggcgacgccggcgctccaggcgagcgaggaccaccagcaattgctggtattggtggagaaaaggccggcggtttcgctccatattatggt

SEQ ID NO: 1017 - DNA, 1638 bp, Artificial Sequence
  Collagen fragment
gacgtcaaatctggtgttgctgttggaggtttagcaggctaccctggtcccgcaggggctccaggtccgccgggtccgcccggagcttcaggtcatcccggaagccctggtgctccaggttatcagggaccgcccggagctcctggacaagctggtccctccggagctcctggtccaccaggtgctattggagctagtggtcctgccggaaaagacggtgcttccggtagacctggtagacccggcgaaaggggtttaccaggtcctcccggagctaagggtccagccggtatacccggtgctcctgggatgaagggtcacagaggatttgatggtagaaacggagagaaaggcgctaccggtgctcccggactgaagggtgctaacggtcttcctggtgagaacggcgctcctggacctatgggtccacgtggtgctccaggagaaagaggcagaccaggagctcctggtgcagctggtgctagaggtgctgatggtgcccgtggttccgatggagctcccgggccacccggccctccaggtgctgctggatttcctggaagccctggtgctaagggggaggttggtccggctggtgctcccggaagtaacggtgccccaggtgctagaggcgaaccaggccctcagggtgctgcaggagcacagggaccgcctggtgctcctggtattaatggttcgcctggagctaaaggtgaaatggggcccgcaggagctcccggtgcgcctggtcttatgggtgccaggggtcctccaggcccggccggtgcaaatggtgctcccggattacgaggagctgctggtgaacctggtaaaaacggtgccaaaggagaaccaggtcctcgtggagctcgtggtgaagctggcattcccggtgctcctggtgcaaaaggtgaggacggtgctgacggttcccctggtgagccaggtgcgaacggactgccaggtgcagccggagctcgaggagctccaggattcaggggagctgccggtcctaacggcattcctggtgctaaagggcccgccggtgaaaggggagctcccggtccagcaggccctcgtggagcagctggtgagcctggacgtgacggtgctccaggagggccaggtatgaggggtgctcccgggtcccctggcggtcctggagctgatggaaaaccagggccaccaggtgctcagggtgaaagcggacgtccaggcgctcccggcccttcaggtccaaggggtgctcctggtgtcatgggtttccccggtgctaagggtaatgacggagcaccgggtgctaatggtgaacgtggtggcccaggtgctccaggaccccaaggtccaccaggagctaacggtgagacaggtcctcaaggagctccaggacctaccggtcctggaggagctaagggagatacgggaccgccaggagctcaaggattgcaaggtttgcctggtgctggaggccctcccggagaaaatggtgctcctggagagccaggaccaaaaggcgctgctggagccccaggtgcacccggagctaagggagacgccggtgctccgggtgagcgtggtcctccggcaattgctggtattggtggagaaaaggccggcggtttcgctccatattatggt

SEQ ID NO: 1018 - DNA, 1638 bp, Artificial Sequence
  Collagen fragment
gacgtcaaatctggtgttgctgttggaggtttagcaggctaccctggtcccgcagggcccccaggtccgccgggtccgcccggaacatcaggtcatcccggaagccctggttcaccaggttatcagggaccgcccggagagcctggacaagctggtccctccggaccccctggtccaccaggtgctattggaccaagtggtcctgccggaaaagacggtgaatccggtagacctggtagacccggcgaaaggggtttaccaggtcctcccggaattaagggtccagccggtatacccggttttcctgggatgaagggtcacagaggatttgatggtagaaacggagagaaaggcgaaaccggtgctcccggactgaagggtgaaaacggtcttcctggtgagaacggcgctcctggacctatgggtccacgtggtgctccaggagaaagaggcagaccaggattgcctggtgcagctggtgctagaggtaacgatggtgcccgtggttccgatggacaacccgggccacccggccctccaggtaccgctggatttcctggaagccctggtgctaagggggaggttggtccggctggtagtcccggaagtaacggtgccccaggtcaaagaggcgaaccaggccctcagggtcacgcaggagcacagggaccgcctggtcctcctggtattaatggttcgcctggaggaaaaggtgaaatggggcccgcaggaatccccggtgcgcctggtcttatgggtgccaggggtcctccaggcccggccggtgcaaatggtgctcccggattacgaggaggagctggtgaacctggtaaaaacggtgccaaaggagaaccaggtcctcgtggagagcgtggtgaagctggcattcccggtgtgcctggtgcaaaaggtgaggacggtaaggacggttcccctggtgagccaggtgcgaacggactgccaggtgcagccggagagcgaggagctccaggattcaggggaccagccggtcctaacggcattcctggtgaaaaagggcccgccggtgaaaggggagctcccggtccagcaggccctcgtggagcagctggtgagcctggacgtgacggtgaaccaggactgatgggtcctaggggtctgcccgggtcccctggcggtcctggacctgcaggaaaagaagggccagtgggtctgcctggtattgacggacgtccaggcccaattggccctgcaggtgcaaggggtgaacctggtgtcatgggtttccccggtccaaagggtaatgacggagacccgggtaaaaatggtgacaagggtcacgcaggtctggcaggagcaaggggtgcaccaggacctgacggtgagacaggtgcacaaggacctccaggacctcaaggtgtccaaggaggaaagggagaacaaggaccggcaggacctcctggatttcaaggtttgcctggtacaggaggccctgcaggagaagtcggtaagcctggagagcaaggactgcacggcgagtttggactgccaggtcccgcaggacctcgtggagagcgtggtgctccgggtgagcgtggtcctccggcaattgctggtattggtggagaaaaggccggcggtttcgctccatattatggt

SEQ ID NO: 1019 - DNA, 1638 bp, Artificial Sequence
  Collagen fragment
gacgtcaaatctggtgttgctgttggaggtttagcaggctaccctggtcccgcagggcccccaggtccgccgggtccgcccggaacatcaggtcatcccggaagccctggttcaccaggttatcagggaccgcccggagagcctggacaagctggtccctccggaccccctggtccaccaggtgctattggaccaagtggtcctgccggaaaaagaggtgaatccggtagacctggtagacccggcgaaaggggtttaccaggtcctcccggaattaagggtccagccggtatacccggttttcctgggatgaagggtcacagaggatttagaggtagaaacggagagaaaggcgaaaccggtgctcccggactgaagggtgaaaacggtcttcctggtgagaacggcgctcctggacctatgggtccacgtggtgctccaggagaaagaggcagaccaggattgcctggtgcagctggtgctagaggtaacagaggtgcccgtggttccgatggacaacccgggccacccggccctccaggtaccgctggatttcctggaagccctggtgctaaggggagagttggtccggctggtagtcccggaagtaacggtgccccaggtcaaagaggcgaaccaggccctcagggtcacgcaggagcacagggaccgcctggtcctcctggtattaatggttcgcctggaggaaaaggtgaaatggggcccgcaggaatccccggtgcgcctggtcttatgggtgccaggggtcctccaggcccggccggtgcaaatggtgctcccggattacgaggaggagctggtagacctggtaaaaacggtgccaaaggagaaccaggtcctcgtggagagcgtggtagagctggcattcccggtgtgcctggtgcaaaaggtgagcgtggtaaggacggttcccctggtgagccaggtgcgaacggactgccaggtgcagccggagagcgaggagctccaggattcaggggaccagccggtcctaacggcattcctggtgaaaaagggcccgccggtgaaaggggagctcccggtccagcaggccctcgtggagcagctggtgagcctggacgtagaggtgtcccaggagggccaggtatgaggggtatgcccgggtcccctggcggtcctggatcgagaggaaaaccagggccaccaggttcgcagggtgaaagcggacgtccaggcccacccggcccttcaggtccaaggggtcagcctggtgtcatgggtttccccggtccaaagggtaatgacggagcaccgggtaaaaatggtgaacgtggtggcccaggtggtccaggaccccaaggtccaccaggaaaaaacggtgagacaggtcctcaaggacctccaggacctaccggtcctggaggaagaaagggagatacgggaccgccaggacctcaaggattgcaaggtttgcctggtacaggaggccctcccggagaaaatggtaagcctggaagaccaggaccaaaaggcgatgctggagccccaggtgcacccggaggtaagggacgtgccggtgctccgggtgagcgtggtcctccggcaattgctggtattggtggagaaaaggccggcggtttcgctccatattatggt

SEQ ID NO: 1020 - DNA, 1638 bp, Artificial Sequence
  Collagen fragment
gacgtcaaatctggtgttgctgttggaggtttagcaggctaccctggtcccgcagggcccccaggtccgccgggtccgcccggagcatcaggtcatcccggaagccctggttcaccaggttatcagggaccgcccggagagcctggacaagctggtcccgcaggaccccctggtccaccaggtgctattggaccaagtggtcctgccggaaaagacggtgaatccggtagacctggtagacccggcgaaaggggtttaccaggtcctcccggaattaagggtccagccggtatacccggttttcctgggatgaagggtcacagaggatttgatggtagaaacggagagaaaggcgaagcaggtgctcccggactgaagggtgaaaacggtcttcctggtgagaacggcgctcctggacctatgggtccacgtggtgctccaggagaaagaggcagaccaggattgcctggtgcagctggtgctagaggtaacgatggtgcccgtggttccgatggacaacccgggccacccggccctccaggtgcagctggatttcctggagcacctggtgctaagggggaggttggtccggctggtagtcccggaagtaacggtgccccaggtcaaagaggcgaaccaggccctcagggtcacgcaggagcacagggaccgcctggtcctcctggtattaatggttcgcctggaggaaaaggtgaaatggggcccgcaggaatccccggtgcgcctggtcttatgggtgccaggggtcctccaggcccggccggtgcaaatggtgctcccggattacgaggaggagctggtgaacctggtaaaaacggtgccaaaggagaaccaggtcctcgtggagagcgtggtgaagctggcattcccggtgtgcctggtgcaaaaggtgaggacggtaaggacggttcccctggtgagccaggtgcgaacggactgccaggtgcagccggagagcgaggagctccaggattcaggggaccagccggtcctaacggcattcctggtgaaaaagggcccgccggtgaaaggggagctcccggtccagcaggccctcgtggagcagctggtgagcctggacgtgacggtgtcccaggagggccaggtatgaggggtatgcccgggtcccctggcggtcctggatcggatggaaaaccagggccaccaggtgcacagggtgaaagcggacgtccaggcccacccggcccttcaggtccaaggggtcagcctggtgtcatgggtttccccggtccaaagggtaatgacggagcaccgggtaaaaatggtgaacgtggtggcccaggtggtccaggaccccaaggtccaccaggaaaaaacggtgagacaggtcctcaaggacctccaggacctaccggtcctggaggagataagggagatacgggaccgccaggacctcaaggattgcaaggtttgcctggtacaggaggccctcccggagaaaatggtaagcctggagagccaggaccaaaaggcgatgctggagccccaggtgcacccggaggtaagggagacgccggtgctccgggtgagcgtggtcctccggcaattgctggtattggtggagaaaaggccggcggtttcgctccatattatggt

SEQ ID NO: 1021 - DNA, 1638 bp, Artificial Sequence
  Collagen fragment
gacgtcaaatctggtgttgctgttggaggtttagcaggctaccctggtcccgcagggcccccaggtccgccgggtccgcccggaaactcaggtcatcccggaagccctggttcaccaggttatcagggaccgcccggagagcctggacaagctggtcccaacggaccccctggtccaccaggtgctattggaccaagtggtcctgccggaaaagacggtgaatccggtagacctggtagacccggcgaaaggggtttaccaggtcctcccggaattaagggtccagccggtatacccggttttcctgggatgaagggtcacagaggatttgatggtagaaacggagagaaaggcgaaaacggtgctcccggactgaagggtgaaaacggtcttcctggtgagaacggcgctcctggacctatgggtccacgtggtgctccaggagaaagaggcagaccaggattgcctggtgcagctggtgctagaggtaacgatggtgcccgtggttccgatggacaacccgggccacccggccctccaggtaacgctggatttcctggaaaccctggtgctaagggggaggttggtccggctggtagtcccggaagtaacggtgccccaggtcaaagaggcgaaccaggccctcagggtcacgcaggagcacagggaccgcctggtcctcctggtattaatggttcgcctggaggaaaaggtgaaatggggcccgcaggaatccccggtgcgcctggtcttatgggtgccaggggtcctccaggcccggccggtgcaaatggtgctcccggattacgaggaggagctggtgaacctggtaaaaacggtgccaaaggagaaccaggtcctcgtggagagcgtggtgaagctggcattcccggtgtgcctggtgcaaaaggtgaggacggtaaggacggttcccctggtgagccaggtgcgaacggactgccaggtgcagccggagagcgaggagctccaggattcaggggaccagccggtcctaacggcattcctggtgaaaaagggcccgccggtgaaaggggagctcccggtccagcaggccctcgtggagcagctggtgagcctggacgtgacggtgtcccaggagggccaggtatgaggggtatgcccgggtcccctggcggtcctggatcggatggaaaaccagggccaccaggtaaccagggtgaaagcggacgtccaggcccacccggcccttcaggtccaaggggtcagcctggtgtcatgggtttccccggtccaaagggtaatgacggagcaccgggtaaaaatggtgaacgtggtggcccaggtggtccaggaccccaaggtccaccaggaaaaaacggtgagacaggtcctcaaggacctccaggacctaccggtcctggaggagataagggagatacgggaccgccaggacctcaaggattgcaaggtttgcctggtacaggaggccctcccggagaaaatggtaagcctggagagccaggaccaaaaggcgatgctggagccccaggtgcacccggaggtaagggagacgccggtgctccgggtgagcgtggtcctccggcaattgctggtattggtggagaaaaggccggcggtttcgctccatattatggt

SEQ ID NO: 1022 - DNA, 1638 bp, Artificial Sequence; identical to SEQ ID NO: 1017
  Collagen fragment

SEQ ID NO: 1023 - DNA, 1638 bp, Artificial Sequence
  Collagen fragment
gacgtcaaatctggtgttgctgtcggaggtttagcaggctaccctggtcccgcagggcccccaggtccgccgggtccgcccggaacatcaggtcatcccggaagccctggttcaccaggttatcagggaccgcccggagagcctggacaagctggtccctccggaccccctggtccaccaggtgctattggaccaagtggtcctgccggaaaagacggtgaatccggtagacctggtagacccggcgaaaggggtttaccaggtcctcccggaattaagggtccagccggtatacccggttttcctgggatgaagggtcacagaggatttgatggtagaaacggagagaaaggcgaaaccggtgctcccggactgaagggtgaaaacggtcttcctggtgagaacggcgctcctggacctatgggtccacgtggtgctccaggagaaagaggcagaccaggattgcctggtgcagctggtgctagaggtaacgatggtgcccgtggttccgatggacaacccgggccacccggccctccaggtaccgctggatttcctggaagccctggtgctaagggggaggttggtccggctggtagtcccggaagtaacggtgccccaggtcaaagaggcgaaccaggccctcagggtcacgcaggagcacagggaccgcctggtcctcctggtattaatggttcgcctggaggaaaaggtgaaatggggcccgcaggaatccccggtgcgcctggtcttatgggtgccaggggtcctccaggcccggccggtgcaaatggtgctcccggattacgaggaggagctggtgaacctggtaaaaacggtgccaaaggagaaccaggtcctcgtggagagcgtggtgaagctggcattcccggtgtgcctggtgcaaaaggtgaggacggtaaggacggttcccctggtgagccaggtgcgaacggactgccaggtgcagccggagagcgaggagctccaggattcaggggaccagccggtcctaacggcattcctggtgaaaaagggcccgccggtgaaaggggagctcccggtccagcaggccctcgtggagcagctggtgagcctggacgtgacggtgtcccaggagggccaggtatgaggggtatgcccgggtcccctggcggtcctggatcggatggaaaaccagggccaccaggttcgcagggtgaaagcggacgtccaggcccacccggcccttcaggtccaaggggtcagcctggtgtcatgggtttccccggtccaaagggtaatgacggagcaccgggtaaaaatggtgaacgtggtggcccaggtggtccaggaccccaaggtccaccaggaaaaaacggtgagacaggtcctcaaggacctccaggacctaccggtcctggaggagataagggagatacgggaccgccaggacctcaaggattgcaaggtttgcctggtacaggaggccctcccggagaaaatggtaagcctggagagccaggaccaaaaggcgatgctggagccccaggtgcacccggaggtaagggagacgccggtgctccgggtgagcgtggtcctccggcaattgctggtattggtggagaaaaggccggcggtttcgctccatattatggt

SEQ ID NO: 1024 - DNA, 954 bp, Artificial Sequence
  Collagen fragment
gacgtcaaatctggtgttgctgttggaggtttagcaggctaccctggtcccgcagggcccccaggtccgccgggtccgcccggaacatcaggtcatcccggaagccctggttcaccaggttatcagggaccgcccggagagcctggacaagctggtccctccggaccccctggtccaccaggtgctattggaccaagtggtcctgccggaaaagacggtgaatccggtagacctggtagacccggcgaaaggggtttaccaggtcctcccggaattaagggtccagccggtatacccggttttcctgggatgaagggtcacagaggatttgatggtagaaacggagagaaaggcgaaaccggtgctcccggactgaagggtgaaaacggtcttcctggtgagaacggcgctcctggacctatgggtccacgtggtgctccaggagaaagaggcagaccaggattgcctggtgcagctggtgctagaggtaacgatggtgcccgtggttccgatggacaacccgggccacccggccctccaggtgctattggaccatctggtcctgctggaaaggatggagagtcaggtcgtccaggtcgtcctggagaaaggggcttgcctggacctcccggaattaagggaccagctggcattcccggcttccccggtatgaaaggacatagaggcttcgacggtcgtaatggtgagaaaggtgagaccggagcaccaggtttgaaaggagagaacggattacctggagaaaatggcgcccctggaccaatgggacctcgtggagctcctggagaacgtggtaggcctggattaccaggagcagccggcgcaagaggcaatgatggtgcacgtggttccgacggacagcctggtccaccaggaccccccgcaattgctggtattggtggagaaaaggccggcggtttcgctccatattatggt

SEQ ID NO: 1025 - DNA, 954 bp, Artificial Sequence; identical to SEQ ID NO: 1024
  Collagen fragment

SEQ ID NO: 1026 - DNA, 1314 bp, Artificial Sequence
  Collagen fragment
gacgtcaaatctggtgttgctgttggaggtttagcaggctaccctggtcccgcagggcccccaggtccgccgggtccgcccggaacatcaggtcatcccggaagccctggttcaccaggttatcagggaccgcccggagagcctggacaagctggtccctccggaccccctggtccaccaggtgctattggaccaagtggtcctgccggaaaagacggtgaatccggtagacctggtagacccggcgaaaggggtttaccaggtcctcccggaattaagggtccagccggtatacccggttttcctgggatgaagggtcacagaggatttgatggtagaaacggagagaaaggcgaaaccggtgctcccggactgaagggtgaaaacggtcttcctggtgagaacggcgctcctggacctatgggtccacgtggtgctccaggagaaagaggcagaccaggattgcctggtgcagctggtgctagaggtaacgatggtgcccgtggttccgatggacaacccgggccacccggccctccaggtgctattggtccatctgggcctgctgggaaggatggtgaatcgggtcggcctggtcggcctggtgaacgtggccttccgggtcctcccggtattaaaggaccggctggtattcccggttttcctggtatgaaaggtcatagaggttttgatggtagaaatggcgaaaagggtgaaactggtgctcctggattgaaaggtgagaatggtctgcctggggagaatggagcgcctggtccaatgggtccaagaggtgctcctggtgaaagaggtagaccgggacttcccggggcagctggcgctcgaggtaatgatggtgctagagggtctgatggtcaaccgggtccacccggtccgccaggtgcaataggtcctagcggaccggcaggcaaagacggggaatcaggtagaccaggaaggcccggggagagagggctacctggcccccccgggattaagggacctgcaggaatccctggcttcccaggcatgaagggtcataggggctttgatggaagaaacggagaaaagggtgaaacgggcgcgcctggccttaaaggggaaaacgggctgcctggggagaacggagctccgggccccatggggccgagaggcgccccaggtgaaagaggcagaccgggattgccaggggctgctggcgcacgtggtaacgacggggcaagagggagcgacggtcaacctggcccgccgggtccaccagcaattgctggtattggtggagaaaaggccggcggtttcgctccatattatggt

SEQ ID NO: 1027 - DNA, 1638 bp, Artificial Sequence
  Collagen fragment
gacgtcaaatctggtgttgctgttggaggtttagcaggctaccctggtcccgcagggcccccaggtccgccgggtccgcccggaacatcaggtcatcccggaagccctggttcaccaggttatcagggaccgcccggagagcctggacaagctggtccctccggaccccctggtccaccaggtgctattggaccaagtggtcctgccggaaaagacggtgaatccggtagacctggtagacccggcgaaaggggtttaccaggtcctcccggaattaagggtccagccggtatacccggttttcctgggatgaagggtcacagaggatttgatggtagaaacggagagaaaggcgaaaccggtgctcccggactgaagggtgaaaacggtcttcctggtgagaacggcgctcctggacctatgggtccacgtggtgctccaggagaaagaggcagaccaggattgcctggtgcagctggtgctagaggtaacgatggtgcccgtggttccgatggacaacccgggccacccggccctccaggtaccgctggatttcctggaagccctggtgctaagggggaggttggtccggctggtagtcccggaagtaacggtgccccaggtcaaagaggcgaaccaggccctcagggtcacgcaggagcacagggaccgcctggtcctcctggtattaatggttcgcctggaggaaaaggtgaaatggggcccgcaggaatccccggtgcgcctggtcttatgggtgccaggggtcctccaggcccggccggtgcaaatggtgctcccggattacgaggaggagctggtgaacctggtaaaaacggtgccaaaggagaaccaggtcctcgtggagagcgtggtgaagctggcattcccggtgtgcctggtgcaaaaggtgaggacggtaaggacggttcccctggtgagccaggtgcgaacggactgccaggtgcagccggagagcgaggagctccaggattcaggggaccagccggtcctaacggcattcctggtgaaaaagggcccgccggtgaaaggggagctcccggtccagcaggccctcgtggagcagctggtgagcctggacgtgacggtgtcccaggagggccaggtatgaggggtatgcccgggtcccctggcggtcctggatcggatggaaaaccagggccaccaggttcgcagggtgaaagcggacgtccaggcccacccggcccttcaggtccaaggggtcagcctggtgtcatgggtttccccggtccaaagggtcaccgtggatttccgggtaaaaatggtgaacgtggtggcccaggtggtccaggaccccaaggtccaccaggaaaaaacggtgagacaggtcctcaaggacctccaggacctaccggtcctggaggagataagggagatacgggaccgccaggacctcaaggattgcaaggtttgcctggtacaggaggccctcccggagaaaatggtaagcctggagagccaggaccaaaaggcgatgctggagccccaggtgcacccggaggtaagggagacgccggtgctccgggtgagcgtggtcctccggcaattgctggtattggtggagaaaaggccggcggtttcgctccatattatggt

SEQ ID NO: 1028 - DNA, 1671 bp, Artificial Sequence
  Collagen fragment
gacgtcaaatctggtgttgctgttggaggtttagcaggctaccctggtcccgcagggcccccaggtccgccgggtccgcccggaacatcaggtcatcccggaagccctggttcaccaggttatcagggaccgcccggagagcctggacaagctggtccctccggaccccctggtccaccaggtgctattggaccaagtggtcctgccggaaaagacggtgaatccggtagacctggtagacccggcgccgctggtttaccaggtcctcccggaattaagggtccagccggtatacccggttttcctgggatgaagggtcacagaggatttgatggtagaaacggagagaaaggcgaaaccggtgctcccggactgaagggtgaaaacggtcttcctggtgccgctggcgctcctggacctatgggtccacgtggtgctccaggagccgctggcagaccaggattgcctggtgcagctggtgctagaggtaacgatggtgcccgtggttccgatggacaacccgggccacccggccctccaggtaccgctggatttcctggaagccctggtgctaagggggaggttggtccggctggtagtcccggaagtaacggtgccccaggtcaaagaggcgaaccaggccctcagggtcacgcaggagcacagggaccgcctggtcctcctggtattaatggttcgcctggaggaaaaggtgaaatggggcccgcaggaatccccggtgcgcctggtcttatgggtgccaggggtcctccaggcccggccggtgcaaatggtgctcccggattacgaggaggagctggtgaacctggtaaaaacggtgccaaaggagaaccaggtcctcgtggagagcgtggtgaagctggcattcccggtgtgcctggtgcaaaaggtgaggacggtaaggacggttcccctggtgagccaggtgcgaacggactgccaggtgcagccggagagcgaggagctccaggattcaggggaccagccggtcctaacggcattcctggtgaaaaagggcccgccggtgaaaggggagctcccggtccagcaggccctcgtggagcagctggtgagcctggacgtgacggtgtcccaggagggccaggtatgaggggtatgcccgggtcccctggcggtcctggatcggatggaaaaccagggccaccaggttcgcagggtgaaagcggacgtccaggcccacccggcccttcaggtccaaggggtcagcctggtgtcatgggtttccccggtccaaagggtaatgacggagcaccgggtaaaaatggtgaacgtggtggcccaggtggtccaggaccccaaggtccaccaggaaaaaacggtgagacaggtcctcaaggacctccaggacctaccggtcctggaggagataagggagatacgggaccgccaggacctcaaggattgcaaggtttgcctggtacaggaggccctcccggagaaaatggtaagcctggagagccaggaccaaaaggcgatgctggagccccaggtgcacccggaggtaagggagacgccggtgctccgggtgccgctggtcctccgaagcaattgctggtattggtggagaaaaggccggcggtttcgctccatattatggttaatcaagaggatgtcagaatgccatttgcc

SEQ ID NO: 1029 - DNA, 1638 bp, Artificial Sequence
  Collagen fragment
gacgtcaaatctggtgttgctgttggaggtttagcaggctaccctggtcccgcagggcccccaggtccgccgggtccgcccggaacatcaggtcatcccggaagccctggttcaccaggttatcagggaccgcccggagagcctggacaagctggtccctccggaccccctggtccaccaggtgctattggaccaagtggtcctgccggaaaagacggtgaatccggtaaacctggtagacccggcgaaaggggtttaccaggtcctcccggaattaagggtccagccggtatacccggttttcctgggatgaagggtcacagaggatttgatggtaaaaacggagagaaaggcgaaaccggtgctcccggactgaagggtgaaaacggtcttcctggtgagaacggcgctcctggacctatgggtccaaagggtgctccaggagaaagaggcaaaccaggattgcctggtgcagctggtgctaagggtaacgatggtgccaaaggttccgatggacaacccgggccacccggccctccaggtaccgctggatttcctggaagccctggtgctaagggggaggttggtccggctggtagtcccggaagtaacggtgccccaggtcaaaaaggcgaaccaggccctcagggtcacgcaggagcacagggaccgcctggtcctcctggtattaatggttcgcctggaggaaaaggtgaaatggggcccgcaggaatccccggtgcgcctggtcttatgggtgccaagggtcctccaggcccggccggtgcaaatggtgctcccggattaaaaggaggagctggtgaacctggtaaaaacggtgccaaaggagaaccaggtcctaaaggagagaagggtgaagctggcattcccggtgtgcctggtgcaaaaggtgaggacggtaaggacggttcccctggtgagccaggtgcgaacggactgccaggtgcagccggagagaaaggagctccaggattcaagggaccagccggtcctaacggcattcctggtgaaaaagggcccgccggtgaaaaaggagctcccggtccagcaggccctaagggagcagctggtgagcctggaaaagacggtgtcccaggagggccaggtatgaaaggtatgcccgggtcccctggcggtcctggatcggatggaaaaccagggccaccaggttcgcagggtgaaagcggaaaaccaggcccacccggcccttcaggtccaaaaggtcagcctggtgtcatgggtttccccggtccaaagggtaatgacggagcaccgggtaaaaatggtgaaaagggtggcccaggtggtccaggaccccaaggtccaccaggaaaaaacggtgagacaggtcctcaaggacctccaggacctaccggtcctggaggagataagggagatacgggaccgccaggacctcaaggattgcaaggtttgcctggtacaggaggccctcccggagaaaatggtaagcctggagagccaggaccaaaaggcgatgctggagccccaggtgcacccggaggtaagggagacgccggtgctccgggtgagcgtggtcctccggcaattgctggtattggtggagaaaaggccggcggtttcgctccatattatggt

SEQ ID NO: 1030 - DNA, 1638 bp, Artificial Sequence
  Collagen fragment
gatgtcaagtcaggtgtggccgtgggtggcctagccggctacccaggcccagctggtccacccggcccacctggcccccccggtacctcaggacatcctggctcccctggttctccaggttaccaaggcccacccggtgagcctggccaggcaggcccttccggccctccaggaccccctggagccattggaccttcaggtccagctggaaaagatggcgagtcaggaagacccggccgtccaggagaacgtggcctacccggtccccccggtatcaagggccccgcaggtattcccggttttcctggaatgaagggacaccgtggatttgatggtaggaacggtgaaaagggcgagacaggtgcaccaggtcttaagggcgagaacggtttgcccggtgagaacggcgctccaggtcctatgggtccccgtggagctcctggcgagcgtggaagacctggtttgcctggtgctgccggtgccaggggaaatgatggagcacgtggttctgatggccagcctggaccccccggaccccctggaactgcaggattccccggagctgtgggcgcaaaaggcgaggcaggtccccaaggtcccagaggtagtgagggacctcagggtgtcagaggagagcctggtcctcctggccccgcaggagctgcaggcccagccggaccacccggagccgatggccaacccggtgccaagggtgctatgggtgctcccggtatcgctggtgcccctggttttccaggtgcacgtggaccacccggaccccaaggcgccggtggtccccctggacccaagggtggcgccggtgaacccggcgcccctggagctaaaggagatactggcgccaagggagagagaggccccgtcggagtgcagggcccacccggacccgccggtgaagagggaaagaggggagccaggggtgaacccggcccaactggcttaccaggtccaccaggtgaaaggggtggacctggttttcgtggcttccctggtgccgatggaatcccaggagagaagggacccgcaggagagcgtggcgcacccggacctgcaggtccaaggggcgccgccggagaaccaggtagagatggtgtccccggcggacccggtatgagaggcatgcccggttcccccggcggacctggctcagatggcaagccaggtccccccggcagtcaaggtgaatcaggaagacctggacccccaggccctagtggacctcgtggtcagccaggagtgatgggctttcctggtcctaagggaaatgacggcgctcccggcaaaaatggtgagagaggaggacccggaggcccaggaccacagggcccaccaggcaagaacggagaaacaggtcctcagggccccccaggacccactggtcccggaggcgataaaggcgatactggtcctcctggtcctcaaggcctacaaggattgccaggaactggaggccccccaggagagaacggaaaacccggtgaaccaggtcccaagggagacgcaggtgctccaggtgcacccggtggtaagggagacgcaggcgcacctggtgagagaggacctcctgcaatagccggcattggaggtgagaaagccggtggttttgctccatactatggt

SEQ ID NO: 1031 - DNA, 1638 bp, Artificial Sequence
  Collagen fragment
gacgtcaaatctggtgttgctgttggaggtattgcaggctaccctggtcccgcagggcccccaggtccgccgggtccgcccggaacatcaggtcatcccggaagccctggttcaccaggttatcagggaccgcccggagagcctggacaagctggtccctccggaccccctggtccaccaggtgctttaggaccaagtggtcctgccggaaaagacggtgaatccggtagacctggtagacccggcgaaaggggtgttccaggtcctcccggagttaagggtccagccggtttacccggttttcctgggatgaagggtcacagaggatttgatggtagaaacggagagaaaggcgaaaccggtgctcccggactgaagggtgaaaacggtcttcctggtgagaacggcgctcctggacctatgggtccacgtggtgctccaggagaaagaggcagaccaggattgcctggtgcagctggtgctagaggtaacgatggtgcccgtggttccgatggacaacccgggccacccggccctccaggtaccgctggatttcctggaagccctggtgctaagggggagttgggtccggctggtagtcccggaagtaacggtgccccaggtcaaagaggcgaaccaggccctcagggtcacgcaggagcacagggaccgcctggtcctcctggtttgaatggttcgcctggaggaaaaggtgaaatggggcccgcaggagttcccggtgcgcctggtattatgggtgccaggggtcctccaggcccggccggtgcaaatggtgctcccggaatacgaggaggagctggtgaacctggtaaaaacggtgccaaaggagaaccaggtcctcgtggagagcgtggtgaagctggcttacccggtttacctggtgcaaaaggtgaggacggtaaggacggttcccctggtgagccaggtgcgaacggagttccaggtgcagccggagagcgaggagctccaggattcaggggaccagccggtcctaacggcttgcctggtgaaaaagggcccgccggtgaaaggggagctcccggtccagcaggccctcgtggagcagctggtgagcctggacgtgacggtattccaggagggccaggtatgaggggtatgcccgggtcccctggcggtcctggatcggatggaaaaccagggccaccaggttcgcagggtgaaagcggacgtccaggcccacccggcccttcaggtccaaggggtcagcctggtttgatgggtttccccggtccaaagggtaatgacggagcaccgggtaaaaatggtgaacgtggtggcccaggtggtccaggaccccaaggtccaccaggaaaaaacggtgagacaggtcctcaaggacctccaggacctaccggtcctggaggagataagggagatacgggaccgccaggacctcaaggagttcaaggtttgcctggtacaggaggccctcccggagaaaatggtaagcctggagagccaggaccaaaaggcgatgctggagccccaggtgcacccggaggtaagggagacgccggtgctccgggtgagcgtggtcctccggcaattgctggtattggtggagaaaaggccggcggtttcgctccatattatggt

SEQ ID NO: 1032 - DNA, 1638 bp, Artificial Sequence
  Collagen fragment
gacgtcaaatctggtgttgctgttggaggtttagcaggctaccctggtcccgcagggcccccaggtccgccgggtccgcccggagcagcaggtcatcccggagcacctggtgcaccaggttatcagggaccgcccggagagcctggacaagctggtcccgctggaccccctggtccaccaggtgctattggaccagctggtcctgccggaaaagacggtgaagcaggtagacctggtagacccggcgaaaggggtttaccaggtcctcccggaattaagggtccagccggtatacccggttttcctgggatgaagggtcacagaggatttgatggtagagatggagagaaaggcgaagcaggtgctcccggactgaagggtgaagatggtcttcctggtgagaacggcgctcctggacctatgggtccacgtggtgctccaggagaaagaggcagaccaggattgcctggtgcagctggtgctagaggtgatgatggtgcccgtggtgctgatggacaacccgggccacccggccctccaggtgcagctggatttcctggagctcctggtgctaagggggaggttggtccggctggtgctcccggagcagatggtgccccaggtcaaagaggcgaaccaggccctcagggtcacgcaggagcacagggaccgcctggtcctcctggtattgatggtgctcctggaggaaaaggtgaaatggggcccgcaggaatccccggtgcgcctggtcttatgggtgccaggggtcctccaggcccggccggtgcagatggtgctcccggattacgaggaggagctggtgaacctggtaaagatggtgccaaaggagaaccaggtcctcgtggagagcgtggtgaagctggcattcccggtgtgcctggtgcaaaaggtgaggacggtaaggacggtgctcctggtgagccaggtgcggatggactgccaggtgcagccggagagcgaggagctccaggattcaggggaccagccggtcctgatggcattcctggtgaaaaagggcccgccggtgaaaggggagctcccggtccagcaggccctcgtggagcagctggtgagcctggacgtgacggtgtcccaggagggccaggtatgaggggtatgcccggggcccctggcggtcctggagctgatggaaaaccagggccaccaggtgctcagggtgaagctggacgtccaggcccacccggccctgctggtccaaggggtcagcctggtgtcatgggtttccccggtccaaagggtgatgacggagcaccgggtaaagatggtgaacgtggtggcccaggtggtccaggaccccaaggtccaccaggaaaagatggtgaggctggtcctcaaggacctccaggacctgctggtcctggaggagataagggagatgctggaccgccaggacctcaaggattgcaaggtttgcctggtgctggaggccctcccggagaagatggtaagcctggagagccaggaccaaaaggcgatgctggagccccaggtgcacccggaggtaagggagacgccggtgctccgggtgagcgtggtcctccggcaattgctggtattggtggagaaaaggccggcggtttcgctccatattatggt

SEQ ID NO: 1033 - DNA, 1638 bp, Artificial Sequence
  Collagen fragment
gacgtcaaatctggtgttgctgttggaggtttagcaggctaccctggtcccgcagggcccccaggtccgccgggtccgcccggaacatcaggtcatcccggaagccctggttcaccaggttatcagggaccgcccggagagcctggacaagctggtccctccggaccccctggtccaccaggtgctattggaccaagtggtcctgccggaaaagacggtgaatccggtagacctggtagacccggcgaaaggggtttaccaggtcctcccggaattaagggtccagccggtatacccggttttcctgggatgaagggtcacagaggatttgatggtagaaacggagagaaaggcgaaaccggtgctcccggactgaagggtgaaaacggtcttcctggtgagaacggcgctcctggacctatgggtccacgtggtgctccaggagaaagaggcagaccaggattgcctggtgcagctggtgctagaggtaacgatggtgcccgtggttccgatggacaacccgggccacccggccctccaggtaccgctggatttcctggaagccctggtgctaagggggaggttggtccggctggtagtcccggaagtaacggtgccccaggtcaaagaggcgaaccaggccctcagggtcacgcaggagcacagggaccgcctggtcctcctggtattaatggttcgcctggaggaaaaggtgaaatggggcccgcaggaatcgaaccaggaagacccgagggagagaaaggaggaggtcgtggtggtgctccaggcgctccaggaagaggagcaggcaacggtgagggagcccgtccaccccctttaatgggtggtgcaggcggtaacaaggctggaccactagctgccccaattcccggtgtgcctggtgcaaaaggtgaggacggtaaggacggttcccctggtgagccaggtgcgaacggactgccaggtgcagccggagagcgaggagctccaggattcaggggaccagccggtcctaacggcattcctggtgaaaaagggcccgccggtgaaaggggagctcccggtccagcaggccctcgtggagcagctggtgagcctggacgtgacggtgtcccaggagggccaggtatgaggggtatgcccgggtcccctggcggtcctggatcggatggaaaaccagggccaccaggttcgcagggtgaaagcggacgtccaggcccacccggcccttcaggtccaaggggtcagcctggtgtcatgggtttccccggtccaaagggtaatgacggagcaccgggtaaaaatggtgaacgtggtggcccaggtggtccaggaccccaaggtccaccaggaaaaaacggtgagacaggtcctcaaggacctccaggacctaccggtcctggaggagataagggagatacgggaccgccaggacctcaaggattgcaaggtttgcctggtacaggaggccctcccggagaaaatggtaagcctggagagccaggaccaaaaggcgatgctggagccccaggtgcacccggaggtaagggagacgccggtgctccgggtgagcgtggtcctccggcaattgctggtattggtggagaaaaggccggcggtttcgctccatattatggt

SEQ ID NO: 1034 - DNA, 1638 bp, Artificial Sequence
  Collagen fragment
gacgtcaaatctggtgttgctgttggaggtttagcaggctaccctggtcccgcagggcccccaggtccgccgggtccgcccggaacatcaggtcatcccggaagccctggttcaccaggttatcagggaccgcccggagagcctggacaagctggtccctccggaccccctggtccaccaggtgctattggaccaagtggtcctgccggaaaaagaggtgaatccggtagacctggtagacccggcgaaaggggtttaccaggtcctcccggaattaagggtccagccggtatacccggttttcctgggatgaagggtcacagaggatttagaggtagaaacggagagaaaggcgaaaccggtgctcccggactgaagggtgaaaacggtcttcctggtgagaacggcgctcctggacctatgggtccacgtggtgctccaggagaaagaggcagaccaggattgcctggtgcagctggtgctagaggtaacagaggtgcccgtggttccgatggacaacccgggccacccggccctccaggtaccgctggatttcctggaagccctggtgctaaggggagagttggtccggctggtagtcccggaagtaacggtgccccaggtcaaagaggcgaaccaggccctcagggtcacgcaggagcacagggaccgcctggtcctcctggtattaatggttcgcctggaggaaaaggtgaaatggggcccgcaggaatccccggtgcgcctggtcttatgggtgccaggggtcctccaggcccggccggtgcaaatggtgctcccggattacgaggaggagctggtagacctggtaaaaacggtgccaaaggagaaccaggtcctcgtggagagcgtggtgaagctggcattcccggtgtgcctggtgcaaaaggtgaggacggtaaggacggttcccctggtgagccaggtgcgaacggactgccaggtgcagccggagagcgaggagctccaggattcaggggaccagccggtcctaacggcattcctggtgaaaaagggcccgccggtgaaaggggagctcccggtccagcaggccctcgtggagcagctggtgagcctggacgtagaggtgtcccaggagggccaggtatgaggggtatgcccgggtcccctggcggtcctggatcggatggaaaaccagggccaccaggttcgcagggtgaaagcggacgtccaggcccacccggcccttcaggtccaaggggtcagcctggtgtcatgggtttccccggtccaaagggtaatgacggagcaccgggtaaaaatggtgaacgtggtggcccaggtggtccaggaccccaaggtccaccaggaaaaaacggtgagacaggtcctcaaggacctccaggacctaccggtcctggaggagataagggagatacgggaccgccaggacctcaaggattgcaaggtttgcctggtacaggaggccctcccggagaaaatggtaagcctggagagccaggaccaaaaggcgatgctggagccccaggtgcacccggaggtaagggagacgccggtgctccgggtgagcgtggtcctccggcaattgctggtattggtggagaaaaggccggcggtttcgctccatattatggt

SEQ ID NO: 1035 - DNA, 1638 bp, Artificial Sequence
  Collagen fragment
gacgtcaaatctggtgttgctgttggaggtttagcaggctaccctggtcccgcagggcccccaggtccgccgggtccgcccggaacatcaggtcatcccggaagccctggttcaccaggttatcagggaccgcccggagagcctggacaagctggtccctccggaccccctggtccaccaggtgctattggaccaagtggtcctgccggaaaaagaggtgaatccggtagacctggtagacccggcgaaaggggtttaccaggtcctcccggaattaagggtccagccggtatacccggttttcctgggatgaagggtcacagaggatttagaggtagaaacggagagaaaggcagaaccggtgctcccggactgaagggtgaaaacggtcttcctggtgagaacggcgctcctggacctatgggtccacgtggtgctccaggagaaagaggcagaccaggattgcctggtgcagctggtgctagaggtaacagaggtgcccgtggttccagaggacaacccgggccacccggccctccaggtaccgctggatttcctggaagccctggtgctaaggggagagttggtccggctggtagtcccggaagtaacggtgccccaggtcaaagaggcagaccaggccctcagggtcacgcaggagcacagggaccgcctggtcctcctggtattaatggttcgcctggaggaaaaggtagaatggggcccgcaggaatccccggtgcgcctggtcttatgggtgccaggggtcctccaggcccggccggtgcaaatggtgctcccggattacgaggaggagctggtagacctggtaaaaacggtgccaaaggaagaccaggtcctcgtggagagcgtggtagagctggcattcccggtgtgcctggtgcaaaaggtagacgtggtaagagaggttcccctggtgagccaggtgcgaacggactgccaggtgcagccggagagcgaggagctccaggattcaggggaccagccggtcctaacggcattcctggtgaaaaagggcccgccggtgaaaggggagctcccggtccagcaggccctcgtggagcagctggtagacctggacgtagaggtgtcccaggagggccaggtatgaggggtatgcccgggtcccctggcggtcctggatcgagaggaaaaccagggccaccaggttcgcagggtgaaagcggacgtccaggcccacccggcccttcaggtccaaggggtcagcctggtgtcatgggtttccccggtccaaagggtaatagaggagcaccgggtaaaaatggtagacgtggtggcccaggtggtccaggaccccaaggtccaccaggaaaaaacggtgagacaggtcctcaaggacctccaggacctaccggtcctggaggaagaaagggaagaacgggaccgccaggacctcaaggattgcaaggtttgcctggtacaggaggccctcccggagaaaatggtaagcctggaagaccaggaccaaaaggcgatgctggagccccaggtgcacccggaggtaagggacgtgccggtgctccgggtgagcgtggtcctccggcaattgctggtattggtggagaaaaggccggcggtttcgctccatattatggt

SEQ ID NO: 1036 - DNA, 1638 bp, Artificial Sequence
  Collagen fragment
gacgtcaaatctggtgttgctgttggaggtatgggtggctaccctggtcccgcagggcccccaggtccgccgggtccgcccggagtttcaggtcatcccggagcacctggtgcaccaggttatcagggaccgcccggagagcctggacaagctggtcccgcaggaccccctggtccaccaggtgctatgggaccagcaggtcctgccggaaaagacggtgaatccggtagacctggtagacccggcgaaaggggttttccaggtcctcccggaattaagggtccagccggtatgcccggttttcctgggatgaagggtcacagaggatttgatggtagaaacggagagaaaggcgataccggtgctcccggactgaagggtgaaaacggtcttcctggtgagaacggcgctcctggacctatgggtccacgtggtgctccaggagaaagaggcagaccaggattgcctggtgcagctggtgctagaggtaacgatggtgcccgtggttccgatggacaacccgggccacccggccctccaggtaccgctggatttcctggaagccctggtgctaagggggaggttggtccggctggtgctcccggaccaaacggtgccccaggtcaaagaggcgaaccaggccttcagggtcaggcaggagcaccgggaccgcctggtcctcctggtattaatggttcgcctggaggaaaaggtgaaatggggcccgcaggaatccccggtgcgcctggtcttatcggtgccaggggtcctccaggcccgccgggtgcaaatggtgtgcccggacagcgaggagctgctggtgaacctggtaaaaacggtgccaaaggagacccaggtgctcgtggagagcgtggtgaagctggcattcccggtattgcaggtcccaaaggtgaggacggtaaggacggttcccctggtgagccaggtgcgaacggactgccaggtgcaccaggagagcgaggaccaccaggattcaggggagcccctggtgctaacggcattcctggtgaaaaagggcccccaggtgaaaggggaggacccggtccagcaggccctcgtggagtcgctggtgagcctggacgtgacggtttgccaggagggccaggtttgaggggtattcccgggtcccctggcggtcctggatcggatggaaaaccagggccaccaggttcgcagggtgaaagcggacgtccaggcccacccggctcacctggtccaaggggtcagcctggtgtcatgggtttccccggtccaaagggtaatgacggagcaccgggtaaaaatggtgaacgtggtggcccaggtggtccaggattgcccggtccagcaggaaaaaacggtgagacaggtcctcaaggacctccaggacctaccggtcctgcaggagataagggagatgcaggaccgccaggacctcctggattgcaaggtttgcctggtacaggaggccctcccggagaaaatggtaagcctggagagccaggaccaaaaggcgatgtcggagccccaggtattcccggaggtaagggagacgccggtgctccgggtgagcgtggtcctccggcaattgctggtattggtggagaaaaggccggcggtttcgctccatattatggt

SEQ ID NO: 1037 - DNA, 1638 bp, Artificial Sequence
  Collagen fragment
gacgtcaaatctggtgttgctgttggaggtttagcaggctaccctggtcccgcagggcccccaggtccgccgggtccgcccggaacatcaggtcatcccggaagccctggttcaccaggttatcagggaccgcccggagagcctggacaagctggtccctccggaccccctggtccaccaggtgctattggaccaagtggtcctgccggaaaagacggtgaatccggtagacctggtagacccggcgaaaggggtttaccaggtcctcccggaattaagggtccagccggtatacccggttttcctgggatgaagggtcacagaggatttgatggtagaaacggagagaaaggcgaaaccggtgctcccggactgaagggtgaaaacggtcttcctggtgagaacggcgctcctggacctatgggtccacgtggtgctccaggagaaagaggcagaccaggattgcctggtgcagctggtgctagaggtaacgatggtgcccgtggttccgatggacaacccgggccacccggccctccaggtaccgctggatttcctggaagccctggtgctaagggggaggttggtccggctggtagtcccggaagtaacggtgccccaggtcaaagaggcgaaccaggccctcagggtcacgcaggagcacagggaccgcctggtcctcctggtattaatggttcgcctggaggaaaaggtgaaatggggcccgcaggaatccccggtgcgcctggtcttatgggtgccaggggtcctccaggcccggccggtgcaaatggtgctcccggattacgaggaggagctggtgaacctggtaaaaacggtgccaaaggagaaccaggtcctcgtggagagcgtggtgaagctggcattcccggtgtgcctggtgcaaaaggtgaggacggtaaggacggttcccctggtgagccaggtgcgaacggactgccaggtgcagccggagagcgaggagctccaggattcaggggaccagccggtcctaacggcgtggcaggtcctaaagggcccgccggtgaaaggggagctcccggtccagcaggccctaaaggagcagctggtgaggcaggacgtcccggtgaagcaggactgccaggtgcaaaaggtatgcccgggtcccctggcggtcctggacctgatggaaaaccagggccaccaggtccagcaggtcaggatggacgtccaggcccacccggccctccgggtgcaaggggtcaggcaggtgtcatgggtttccccggtccaaagggtgcagcaggagaaccgggtaaagcaggtgaacgtggtgtcccaggtccgccaggagcagtcggtccagcaggaaaagatggtgaggcaggtgcacaaggacctccaggacctgcaggtcctgcaggagagaggggagagcagggaccggcaggacctcaaggatttcaaggtttgcctggtcctgcaggccctcccggagaagcaggtaagcctggagagcaaggagtccccggcgatttgggagccccaggtgcacccggagcaaggggagagaggggtgctccgggtgagcgtggtcctccggcaattgctggtattggtggagaaaaggccggcggtttcgctccatattatggt

SEQ ID NO: 1038 - DNA, 1584 bp, Artificial Sequence
  Collagen fragment
gacgtcaaatctggtgttgctgtcggaggtttagcaggctaccctggtcccgcagggcccccaggtccgccgggtccgcccggaacatcaggtcatcccggaagccctggttcaccaggttatcagggaccgcccggagagcctggacaagctggtccctccggaccccctggtccaccaggtgctattggaccaagtggtcctgccggaaaagacggtgaatccggtagacctggtagacccggcgaaaggggtttaccaggtcctcccggaattaagggtccagccggtatacccggttttcctgggatgaagggtcacagaggatttgatggtagaaacggagagaaaggcgaaaccggtgctcccggactgaagggtgaaaacggtcttcctggtgagaacggcgctcctggacctatgggtccacgtggtgctccaggagaaagaggcagaccaggattgcctggtgcagctggtgctagaggtaacgatggtgcccgtggttccgatggacaacccgggccacccggccctccaggtaccgctggatttcctggaagccctggtgctaagggggaggttggtccggctggtagtcccggaagtaacggtgccccaggtcaaagaggcgaaccaggccctcagggtcacgcaggagcacagggaccgcctggtcctcctggtattaatggttcgcctggaggaaaaggtgaaatggggcccgcaggaatccccggtgcgcctggtcttatgggtgccaggggtcctccaggcccggccggtgcaaatggtgctcccggattacgaggaggagctggtgaacctggtaaaaacggtgccaaaggagaaccaggtcctcgtggagagcgtggtgaagctggcattcccggtgtgcctggtgcaaaaggtgaggacggtaaggacggttcccctggtgagccaggtgcgaacggactgccaggtgcagccggagagcgaggagctccaggattcaggggaccagccggtcctaacggcattcctggtgaaaaagggcccgccggtgaaaggggagctcccggtccagcaggccctcgtggagcagctggtgagcctggacgtgacggtgtcccaggagggccaggtatgaggggtatgcccgggtcccctggcggtcctggatcggatggaaaaccagggccaccaggttcgcagggtgaaagcggacgtccaggcccacccggcccttcaggtccaaggggtcagcctggtgtcatgggtttccccggtccaaagggtaatgacggagcaccgggtaaaaatggtgaacgtggtggcccaggtggtccaggaccccaaggtccaccaggaaaaaacggtgagacaggtcctcaaggacctccaggacctaccggtcctggaggagataagggagatacgggaccgccaggacctcaaggattgcaaggtttgcctggtacaggaggccctcccggagaaaatggtaagcctggagagccaggaccaaaaggcgatgctggagccccaggtgcacccggaggtaagggagacgccggtgctccgggtgagcgtggtcctccg

SEQ ID NO: 1039 - DNA, 1668 bp, Artificial Sequence
  Collagen fragment
gacgtcaaatctggtgttgctgttggaaaaacaacaaaatcaggtttagcaggctaccctggtcccgcagggcccccaggtccgccgggtccgcccggaacatcaggtcatcccggaagccctggttcaccaggttatcagggaccgcccggagagcctggacaagctggtccctccggaccccctggtccaccaggtgctattggaccaagtggtcctgccggaaaagacggtgaatccggtagacctggtagacccggcgaaaggggtttaccaggtcctcccggaattaagggtccagccggtatacccggttttcctgggatgaagggtcacagaggatttgatggtagaaacggagagaaaggcgaaaccggtgctcccggactgaagggtgaaaacggtcttcctggtgagaacggcgctcctggacctatgggtccacgtggtgctccaggagaaagaggcagaccaggattgcctggtgcagctggtgctagaggtaacgatggtgcccgtggttccgatggacaacccgggccacccggccctccaggtaccgctggatttcctggaagccctggtgctaagggggaggttggtccggctggtagtcccggaagtaacggtgccccaggtcaaagaggcgaaccaggccctcagggtcacgcaggagcacagggaccgcctggtcctcctggtattaatggttcgcctggaggaaaaggtgaaatggggcccgcaggaatccccggtgcgcctggtcttatgggtgccaggggtcctccaggcccggccggtgcaaatggtgctcccggattacgaggaggagctggtgaacctggtaaaaacggtgccaaaggagaaccaggtcctcgtggagagcgtggtgaagctggcattcccggtgtgcctggtgcaaaaggtgaggacggtaaggacggttcccctggtgagccaggtgcgaacggactgccaggtgcagccggagagcgaggagctccaggattcaggggaccagccggtcctaacggcattcctggtgaaaaagggcccgccggtgaaaggggagctcccggtccagcaggccctcgtggagcagctggtgagcctggacgtgacggtgtcccaggagggccaggtatgaggggtatgcccgggtcccctggcggtcctggatcggatggaaaaccagggccaccaggttcgcagggtgaaagcggacgtccaggcccacccggcccttcaggtccaaggggtcagcctggtgtcatgggtttccccggtccaaagggtaatgacggagcaccgggtaaaaatggtgaacgtggtggcccaggtggtccaggaccccaaggtccaccaggaaaaaacggtgagacaggtcctcaaggacctccaggacctaccggtcctggaggagataagggagatacgggaccgccaggacctcaaggattgcaaggtttgcctggtacaggaggccctcccggagaaaatggtaagcctggagagccaggaccaaaaggcgatgctggagccccaggtgcacccggaggtaagggagacgccggtgctccgggtgagcgtggtcctccgaaaacaacaaaatcagcaattgctggtattggtggagaaaaggccggcggtttcgctccatattatggt

SEQ ID NO: 1040 - DNA, 1668 bp, Artificial Sequence; identical to SEQ ID NO: 1039
  Collagen fragment

SEQ ID NO: 1041 - DNA, 1668 bp, Artificial Sequence
  Collagen fragment
gacgtcaaatctggtgttgctgttggaaaaacaacaaaatcaggtttagcaggctaccctggtcccgcagggcccccaggtccgccgggtccgcccggaacatcaggtcatcccggaagccctggttcaccaggttatcagggaccgcccggagagcctggacaagctggtccctccggaccccctggtccaccaggtgctattggaccaagtggtcctgccggaaaagacggtgaatccggtagacctggtagacccggcgccgctggtttaccaggtcctcccggaattaagggtccagccggtatacccggttttcctgggatgaagggtcacagaggatttgatggtagaaacggagagaaaggcgaaaccggtgctcccggactgaagggtgaaaacggtcttcctggtgccgctggcgctcctggacctatgggtccacgtggtgctccaggagccgctggcagaccaggattgcctggtgcagctggtgctagaggtaacgatggtgcccgtggttccgatggacaacccgggccacccggccctccaggtaccgctggatttcctggaagccctggtgctaagggggaggttggtccggctggtagtcccggaagtaacggtgccccaggtcaaagaggcgaaccaggccctcagggtcacgcaggagcacagggaccgcctggtcctcctggtattaatggttcgcctggaggaaaaggtgaaatggggcccgcaggaatccccggtgcgcctggtcttatgggtgccaggggtcctccaggcccggccggtgcaaatggtgctcccggattacgaggaggagctggtgaacctggtaaaaacggtgccaaaggagaaccaggtcctcgtggagagcgtggtgaagctggcattcccggtgtgcctggtgcaaaaggtgaggacggtaaggacggttcccctggtgagccaggtgcgaacggactgccaggtgcagccggagagcgaggagctccaggattcaggggaccagccggtcctaacggcattcctggtgaaaaagggcccgccggtgaaaggggagctcccggtccagcaggccctcgtggagcagctggtgagcctggacgtgacggtgtcccaggagggccaggtatgaggggtatgcccgggtcccctggcggtcctggatcggatggaaaaccagggccaccaggttcgcagggtgaaagcggacgtccaggcccacccggcccttcaggtccaaggggtcagcctggtgtcatgggtttccccggtccaaagggtaatgacggagcaccgggtaaaaatggtgaacgtggtggcccaggtggtccaggaccccaaggtccaccaggaaaaaacggtgagacaggtcctcaaggacctccaggacctaccggtcctggaggagataagggagatacgggaccgccaggacctcaaggattgcaaggtttgcctggtacaggaggccctcccggagaaaatggtaagcctggagagccaggaccaaaaggcgatgctggagccccaggtgcacccggaggtaagggagacgccggtgctccgggtgccgctggtcctccgaaaacaacaaaatcagcaattgctggtattggtggagaaaaggccggcggtttcgctccatattatggt

SEQ ID NO: 1042 - DNA, 1638 bp, Artificial Sequence
  Collagen fragment
gacgtcaaatctggtgttgctgttggaggtttagcaggctaccctggtcccgcagggcccccaggtccgccgggtccgcccggaacatcaggtcatcccggaagccctggttcaccaggttatcagggaccgcccggagagcctggacaagctggtccctccggaccccctggtccaccaggtgctattggaccaagtggtcctgccggaaaagacggtgaatccggtagacctggtagacccggcgaaaggggtttaccaggtcctcccggaattaagggtccagccggtatacccggttttcctgggatgaagggtcacagaggatttgatggtagaaacggagagaaaggcgaaaccggtgctcccggactgaagggtgaaaacggtcttcctggtgagaacggcgctcctggacctatgggtccacgtggtgctccaggagaaagaggcagaccaggattgcctggtgcagctggtgctagaggtaacgatggtgcccgtggttccgatggacaacccgggccacccggccctccaggtaccgctggatttcctggaagccctggtgctaagggggaggttggtccggctggtagtcccggaagtaacggtgccccaggtcaaagaggcgaaccaggccctcagggtcacgcaggagcacagggaccgcctggtcctcctggtattaatggttcgcctggaggaaaaggtgaaatggggcccgcaggaatccccggtgcgcctggtcttatgggtgccaggggtcctccaggcccggccggtgcaaatggtgctcccggattacgaggaggagctggtgaacctggtaaaaacggtgccaaaggagaaccaggtcctcgtggagagcgtggtgaagctggcattcccggtgtgcctggtgcaaaaggtgaggagggtaagcgaggtgcacgaggtgaggcaggttcggcgggacctccaggtcctccaggattacgaggagctccaggattcaggggattaccaggtgcagatggcagggcaggtgtgatggggccccctggtgaaaggggagctcccggtccagcaggcgtgcgtggagcagctggtgatgcaggacgtcctggtgaaccaggattaatgggtcctaggggtttacccgggtcccctggcggtcctggacctgcaggaaaagaagggccagtgggtttacctggtattgatggacgtccaggcccaattggccctgcaggtgcaaggggtgaacctggtgtcatgggtttccccggtccaaagggtaatgacggagatccgggtaaaaatggtgacaaaggtcacgcaggtttagcaggagcaaggggtgcaccaggacccgatggtgagacaggtcctcaaggacctccaggacctaccggtcctggaggagataagggagatacgggaccgccaggacctcaaggattgcaaggtttgcctggtacaggaggccctcccggagaaaatggtaagcctggagagccaggaccaaaaggcgatgctggagccccaggtgcacccggaggtaagggagacgccggtgctccgggtgagcgtggtcctccggcaattgctggtattggtggagaaaaggccggcggtttcgctccatattatggt

SEQ ID NO: 1043 - DNA, 1638 bp, Artificial Sequence; identical to SEQ ID NO: 1036
  Collagen fragment

SEQ ID NO: 1044 - DNA, 1638 bp, Artificial Sequence
  Collagen fragment
gacgtcaaatctggtgttgctgtcggaggtttagcaggctaccctggtcccgcagggcccccaggtccgccgggtccgcccggaacatcaggtcatcccggaagccctggttcaccaggttatcagggaccgcccggagagcctggacaagctggtccagctggtccaccaggtccaattggtaacgttggaccaagtggtcctgccggaaaagacggtgaatccggtagacctggtagacccggcgaaaggggtttaccaggtcctcccggaattaagggtccagccggtatacccggttttcctgggatgaagggtcacagaggatttgatggtagaaacggagagaaaggcgaaaccggtgctcccggactgaagggtgaaaacggtcttcctggtgagaacggcgctcctggacctatgggtccacgtggtgctccaggagaaagaggcagaccaggattgcctggtgcagctggtgctagaggtaacgatggtgcccgtggttccgatggacaacccgggccacccggccctccaggtaccgctggatttcctggaagccctggtgctaagggggaggttggtccggctggtagtcccggaagtaacggtgccccaggtcaaagaggcgaaccaggccctcagggtcacgcaggagcacagggaccgcctggtcctcctggtattaatggttcgcctggaggaaaaggtgaaatggggcccgcaggaatccccggtgcgcctggtcttatgggtgccaggggtcctccaggcccggccggtgcaaatggtgctcccggattacgaggaggagctggtgaacctggtaaaaacggtgccaaaggagaaccaggtcctcgtggagagcgtggtgaagctggcattcccggtgtgcctggtgcaaaaggtgaggacggtaaggacggttcccctggtgagccaggtgcgaacggactgccaggtgcagccggagagcgaggagctccaggattcaggggaccagccggtcctaacggcattcctggtgaaaaagggcccgccggtgaaaggggagctcccggtccagcaggccctcgtggagcagctggtgagcctggacgtgacggtgtcccaggagggccaggtatgaggggtatgcccgggtcccctggcggtcctggatcggatggaaaaccagggccaccaggttcgcagggtgaaagcggacgtccaggcccacccggcccttcaggtccaaggggtcagcctggtgtcatgggtttccccggtccaaagggtaatgacggagcaccgggtaaaaatggtgaacgtggtggcccaggtggtccaggaccccaaggtccaccaggaaaaaacggtgagacaggtcctcaaggacctccaggacctaccggtcctggaggagataagggagatacgggaccgccaggacctcaaggattgcaaggtttgcctggtacaggaggccctcccggagaaaatggtaagcctggagagccaggaccaaaaggcgatgctggagccccaggtgcacccggaggtaagggagacgccggtgctccgggtgagcgtggtcctccggcaattgctggtattggtggagaaaaggccggcggtttcgctccatattatggt

SEQ ID NO: 1045 - DNA, 5298 bp, Artificial Sequence
  Plasmid
ggatccttcagtaatgtcttgtttcttttgttgcagtggtgagccattttgacttcgtgaaagtttctttagaatagttgtttccagaggccaaacattccacccgtagtaaagtgcaagcgtaggaagaccaagactggcataaatcaggtataagtgtcgagcactggcaggtgatcttctgaaagtttctactagcagataagatccagtagtcatgcatatggcaacaatgtaccgtgtggatctaagaacgcgtcctactaaccttcgcattcgttggtccagtttgttgttatcgatcaacgtgacaaggttgtcgattccgcgtaagcatgcatacccaaggacgcctgttgcaattccaagtgagccagttccaacaatctttgtaatattagagcacttcattgtgttgcgcttgaaagtaaaatgcgaacaaattaagagataatctcgaaaccgcgacttcaaacgccaatatgatgtgcggcacacaataagcgttcatatccgctgggtgactttctcgctttaaaaaattatccgaaaaaattttctagagtgttgttactttatacttccggctcgtataatacgacaaggtgtaaggaggactaaaccatggctaaactcacctctgctgttccagtcctgactgctcgtgatgttgctggtgctgttgagttctggactgataggctcggtttctcccgtgacttcgtagaggacgactttgccggtgttgtacgtgacgacgttaccctgttcatctccgcagttcaggaccaggttgtgccagacaacactctggcatgggtatgggttcgtggtctggacgaactgtacgctgagtggtctgaggtcgtgtctaccaacttccgtgatgcatctggtccagctatgaccgagatcggtgaacagccctggggtcgtgagtttgcactgcgtgatccagctggtaactgcgtgcatttcgtcgcagaagagcaggactaacaattgacaccttacgattatttagagagtatttattagttttattgtatgtatacggatgttttattatctatttatgcccttatattctgtaactatccaaaagtcctatcttatcaagccagcaatctatgtccgcgaacgtcaactaaaaataagctttttatgctcttctctctttttttcccttcggtataattataccttgcatccacagattctcctgccaaattttgcataatcctttacaacatggctatatgggagcacttagcgccctccaaaacccatattgcctacgcatgtataggtgttttttccacaatattttctctgtgctctctttttattaaagagaagctctatatcggagaagcttctgtggccgttatattcggccttatcgtgggaccacattgcctgaattggtttgccccggaagattggggaaacttggatctgattaccttagctgcagaaaagggtaccactgagcgtcagaccccgtagaaaagatcaaaggatcttcttgagatcctttttttctgcgcgtaatctgctgcttgcaaacaaaaaaaccaccgctaccagcggtggtttgtttgccggatcaagagctaccaactctttttccgaaggtaactggcttcagcagagcgcagataccaaatactgttcttctagtgtagccgtagttaggccaccacttcaagaactctgtagcaccgcctacatacctcgctctgctaatcctgttaccagtggctgctgccagtggcgataagtcgtgtcttaccgggttggacccaagacgatagttaccggataaggcgcagcggtcgggctgaacggggggttcgtgcacacagcccagcttggagcgaacgacctacaccgaactgagatacctacagcgtgagctatgagaaagcgccacgcttcccgaagggagaaaggcggacaggtatccggtaagcggcagggtcggaacaggagagcgcacgagggagcttccagggggaaacgcctggtatctttatagtcctgtcgggtttcgccacctctgacttgagcgtcgatttttgtgatgctcgtcaggggggcggagcctatggaaaaacgccagcaacgcggcctttttacggttcctggccttttgctggccttttgctcacatgtatttcagaagcgatagagagactgcgctaagcattaatgagattatttttgagcattcgtcaatcaataccaaacaagacaaacggtatgccgacttttggaagtttctttttgaccaactggccgttagcatttcaacgaaccaaacttagttcatcttggatgagatcacgcttttgtcatattaggttccaagacagcgtttaaactgtcagttttgggccatttggggaacatgaaactatttgaccccacactcagaaagccctcatctggagtgatgttcgggtgtaatgcggagcttgttgcattcggaaataaacaaacatgaacctcgccaggggggccaggatagacaggctaataaagtcatggtgttagtagcctaatagaaggaattggaatatttaaataatgtatctaaacgcaaactccgagctggaaaaatgttaccggcgatgcgcggacaatttagaggcggcgatcaagaaacacctgctgggcgagcagtctggagcacagtcttcgatgggcccgagatccgataaccgtgctgggtaccgggacgtgaggcagcgcgacatccatcaaatataccaggcgccaaccgagtctctcggaaaacagcttctggatatcttccgctggcggcgcaacgacgaataatagtccctggaggtgacggaatatatatgtgtggagggtaaatctgacagggtgtagcaaaggtaatattttcctaaaacatgcaatcggctgccccgcaacgggaaaaagaatgactttggcactcttcaccagagtggggtgtcccgctcgtgtgtgcaaataggctcccactggtcaccccggattttgcagaaaaacagcaagttccggggtgtctcactggtgtccgccaataagaggagccggcaggcacggagtctacatcaagctgtctccgatacactcgactaccatccgggtctctcagagaggggaatggcactataaataccgcctccttgcgctctctgccttcatcaatcaaatcatgtacaggaacttaataattgctactgcccttacttgcggtgcatacagtgcctacgtgccttccgaaccatggagcacactgacacctgatgctagccttgaaagtgccctcaaagattactcacaaacttttggaatagctattaagtccttagatgccgacaagattaagagagacgtcaaatctggtgttgctgtcggaggacttgcaggatatccaggacctgccggaccacctggaccaccaggcccaccaggcacctcaggccatccaggctccccaggatcacctggatatcagggaccaccaggcgagccaggacaggccggcccaagtggaccacctggaccaccaggcgccataggcccttcaggcccagccggaaaagacggagagagtggccgtccaggaaggccaggagaaaggggactgccaggaccacctggcatcaaaggccctgccggaataccaggattcccaggcatgaaaggacatcgtggattcgacggaaggaatggagagaaaggcgagaccggcgccccaggactcaaaggcgagaatggcctgcctggagagaatggagccccaggaccaatgggccctcgtggagccccaggcgaaaggggacgtcctggactgccaggagccgcaggcgcccgtggcaatgacggcgccaggggaagtgacggccagcctggaccaccaggcccaccaggaacagctggattcccaggatccccaggcgccaaaggcgaggtaggaccagcaggatcaccaggcagtaatggcgctccaggacagcgtggagagccaggaccacaaggacatgccggcgcccagggcccaccaggaccaccaggaatcaatggcagtccaggcggcaaaggagagatgggcccagccggaatcccaggagccccaggattgatgggagctcgtggcccacctggacctgctggcgccaatggcgccccaggattgaggggcggcgcaggcgaaccaggcaaaaatggcgctaaaggagaaccaggacctcgaggcgagcgtggcgaagccggcatccctggcgtacctggagccaaaggagaggacggaaaagacggaagtccaggagagccaggcgcaaatggactgcctggagccgcaggagagcgtggcgctccaggattcaggggaccagccggacctaatggaatccctggagagaaaggcccagccggagaacgaggcgcccctggaccagcaggaccacgtggagccgccggagagccaggacgtgacggagtcccaggaggccctggaatgcgtggaatgccaggaagtcctggaggacctggaagtgacggaaaacctggaccaccaggaagtcagggagagagtggcaggcctggcccaccaggaccttcaggcccaaggggccaaccaggcgtcatgggattcccaggcccaaaaggaaatgacggcgccccaggcaaaaatggagagaggggcggaccaggaggaccaggaccacaaggcccaccaggaaaaaatggcgagacaggaccacaaggaccacctggaccaacaggaccaggcggcgacaaaggagacaccggaccaccaggccctcagggactccagggactgccaggcaccggcggcccacctggagagaatggaaaaccaggagagcctggccctaaaggcgacgctggcgcaccaggagcccctggaggaaaaggcgacgccggcgctccaggcgagcgaggaccaccagcaattgctggtattggtggagaaaaggccggcggtttcgctccatattatggttaatcaagaggatgtcagaatgccatttgcctgagagatgcaggcttcatttttgatacttttttatttgtaacctatatagtataggattttttttgtcattttgtttcttctcgtacgagcttgctcctgatcagcctatctcgcagctgatgaatatcttgtggtaggggtttgggaaaatcattcgagtttgatgtttttcttggtatttcccactcctcttcagagtacagaagattaagtgagacgttcgtttgtgctccgga

SEQ ID NO: 1046 - DNA, 5298 bp, Artificial Sequence
  Plasmid
ggatccttcagtaatgtcttgtttcttttgttgcagtggtgagccattttgacttcgtgaaagtttctttagaatagttgtttccagaggccaaacattccacccgtagtaaagtgcaagcgtaggaagaccaagactggcataaatcaggtataagtgtcgagcactggcaggtgatcttctgaaagtttctactagcagataagatccagtagtcatgcatatggcaacaatgtaccgtgtggatctaagaacgcgtcctactaaccttcgcattcgttggtccagtttgttgttatcgatcaacgtgacaaggttgtcgattccgcgtaagcatgcatacccaaggacgcctgttgcaattccaagtgagccagttccaacaatctttgtaatattagagcacttcattgtgttgcgcttgaaagtaaaatgcgaacaaattaagagataatctcgaaaccgcgacttcaaacgccaatatgatgtgcggcacacaataagcgttcatatccgctgggtgactttctcgctttaaaaaattatccgaaaaaattttctagagtgttgttactttatacttccggctcgtataatacgacaaggtgtaaggaggactaaaccatggctaaactcacctctgctgttccagtcctgactgctcgtgatgttgctggtgctgttgagttctggactgataggctcggtttctcccgtgacttcgtagaggacgactttgccggtgttgtacgtgacgacgttaccctgttcatctccgcagttcaggaccaggttgtgccagacaacactctggcatgggtatgggttcgtggtctggacgaactgtacgctgagtggtctgaggtcgtgtctaccaacttccgtgatgcatctggtccagctatgaccgagatcggtgaacagccctggggtcgtgagtttgcactgcgtgatccagctggtaactgcgtgcatttcgtcgcagaagagcaggactaacaattgacaccttacgattatttagagagtatttattagttttattgtatgtatacggatgttttattatctatttatgcccttatattctgtaactatccaaaagtcctatcttatcaagccagcaatctatgtccgcgaacgtcaactaaaaataagctttttatgctcttctctctttttttcccttcggtataattataccttgcatccacagattctcctgccaaattttgcataatcctttacaacatggctatatgggagcacttagcgccctccaaaacccatattgcctacgcatgtataggtgttttttccacaatattttctctgtgctctctttttattaaagagaagctctatatcggagaagcttctgtggccgttatattcggccttatcgtgggaccacattgcctgaattggtttgccccggaagattggggaaacttggatctgattaccttagctgcagaaaagggtaccactgagcgtcagaccccgtagaaaagatcaaaggatcttcttgagatcctttttttctgcgcgtaatctgctgcttgcaaacaaaaaaaccaccgctaccagcggtggtttgtttgccggatcaagagctaccaactctttttccgaaggtaactggcttcagcagagcgcagataccaaatactgttcttctagtgtagccgtagttaggccaccacttcaagaactctgtagcaccgcctacatacctcgctctgctaatcctgttaccagtggctgctgccagtggcgataagtcgtgtcttaccgggttggacccaagacgatagttaccggataaggcgcagcggtcgggctgaacggggggttcgtgcacacagcccagcttggagcgaacgacctacaccgaactgagatacctacagcgtgagctatgagaaagcgccacgcttcccgaagggagaaaggcggacaggtatccggtaagcggcagggtcggaacaggagagcgcacgagggagcttccagggggaaacgcctggtatctttatagtcctgtcgggtttcgccacctctgacttgagcgtcgatttttgtgatgctcgtcaggggggcggagcctatggaaaaacgccagcaacgcggcctttttacggttcctggccttttgctggccttttgctcacatgtatttcagaagcgatagagagactgcgctaagcattaatgagattatttttgagcattcgtcaatcaataccaaacaagacaaacggtatgccgacttttggaagtttctttttgaccaactggccgttagcatttcaacgaaccaaacttagttcatcttggatgagatcacgcttttgtcatattaggttccaagacagcgtttaaactgtcagttttgggccatttggggaacatgaaactatttgaccccacactcagaaagccctcatctggagtgatgttcgggtgtaatgcggagcttgttgcattcggaaataaacaaacatgaacctcgccaggggggccaggatagacaggctaataaagtcatggtgttagtagcctaatagaaggaattggaatatttaaataatgtatctaaacgcaaactccgagctggaaaaatgttaccggcgatgcgcggacaatttagaggcggcgatcaagaaacacctgctgggcgagcagtctggagcacagtcttcgatgggcccgagatccgataaccgtgctgggtaccgggacgtgaggcagcgcgacatccatcaaatataccaggcgccaaccgagtctctcggaaaacagcttctggatatcttccgctggcggcgcaacgacgaataatagtccctggaggtgacggaatatatatgtgtggagggtaaatctgacagggtgtagcaaaggtaatattttcctaaaacatgcaatcggctgccccgcaacgggaaaaagaatgactttggcactcttcaccagagtggggtgtcccgctcgtgtgtgcaaataggctcccactggtcaccccggattttgcagaaaaacagcaagttccggggtgtctcactggtgtccgccaataagaggagccggcaggcacggagtctacatcaagctgtctccgatacactcgactaccatccgggtctctcagagaggggaatggcactataaataccgcctccttgcgctctctgccttcatcaatcaaatcatgtacaggaacttaataattgctactgcccttacttgcggtgcatacagtgcctacgtgccttccgaaccatggagcacactgacacctgatgctagccttgaaagtgccctcaaagattactcacaaacttttggaatagctattaagtccttagatgccgacaagattaagagagacgtcaaatctggtgttgctgttggaggtttagcaggctaccctggtcccgcaggggctccaggtccgccgggtccgcccggagcttcaggtcatcccggaagccctggtgctccaggttatcagggaccgcccggagctcctggacaagctggtccctccggagctcctggtccaccaggtgctattggagctagtggtcctgccggaaaagacggtgcttccggtagacctggtagacccggcgaaaggggtttaccaggtcctcccggagctaagggtccagccggtatacccggtgctcctgggatgaagggtcacagaggatttgatggtagaaacggagagaaaggcgctaccggtgctcccggactgaagggtgctaacggtcttcctggtgagaacggcgctcctggacctatgggtccacgtggtgctccaggagaaagaggcagaccaggagctcctggtgcagctggtgctagaggtgctgatggtgcccgtggttccgatggagctcccgggccacccggccctccaggtgctgctggatttcctggaagccctggtgctaagggggaggttggtccggctggtgctcccggaagtaacggtgccccaggtgctagaggcgaaccaggccctcagggtgctgcaggagcacagggaccgcctggtgctcctggtattaatggttcgcctggagctaaaggtgaaatggggcccgcaggagctcccggtgcgcctggtcttatgggtgccaggggtcctccaggcccggccggtgcaaatggtgctcccggattacgaggagctgctggtgaacctggtaaaaacggtgccaaaggagaaccaggtcctcgtggagctcgtggtgaagctggcattcccggtgctcctggtgcaaaaggtgaggacggtgctgacggttcccctggtgagccaggtgcgaacggactgccaggtgcagccggagctcgaggagctccaggattcaggggagctgccggtcctaacggcattcctggtgctaaagggcccgccggtgaaaggggagctcccggtccagcaggccctcgtggagcagctggtgagcctggacgtgacggtgctccaggagggccaggtatgaggggtgctcccgggtcccctggcggtcctggagctgatggaaaaccagggccaccaggtgctcagggtgaaagcggacgtccaggcgctcccggcccttcaggtccaaggggtgctcctggtgtcatgggtttccccggtgctaagggtaatgacggagcaccgggtgctaatggtgaacgtggtggcccaggtgctccaggaccccaaggtccaccaggagctaacggtgagacaggtcctcaaggagctccaggacctaccggtcctggaggagctaagggagatacgggaccgccaggagctcaaggattgcaaggtttgcctggtgctggaggccctcccggagaaaatggtgctcctggagagccaggaccaaaaggcgctgctggagccccaggtgcacccggagctaagggagacgccggtgctccgggtgagcgtggtcctccggcaattgctggtattggtggagaaaaggccggcggtttcgctccatattatggttaatcaagaggatgtcagaatgccatttgcctgagagatgcaggcttcatttttgatacttttttatttgtaacctatatagtataggattttttttgtcattttgtttcttctcgtacgagcttgctcctgatcagcctatctcgcagctgatgaatatcttgtggtaggggtttgggaaaatcattcgagtttgatgtttttcttggtatttcccactcctcttcagagtacagaagattaagtgagacgttcgtttgtgctccgga

SEQ ID NO: 1047 - DNA, 5298 bp, Artificial Sequence
  Plasmid
ggatccttcagtaatgtcttgtttcttttgttgcagtggtgagccattttgacttcgtgaaagtttctttagaatagttgtttccagaggccaaacattccacccgtagtaaagtgcaagcgtaggaagaccaagactggcataaatcaggtataagtgtcgagcactggcaggtgatcttctgaaagtttctactagcagataagatccagtagtcatgcatatggcaacaatgtaccgtgtggatctaagaacgcgtcctactaaccttcgcattcgttggtccagtttgttgttatcgatcaacgtgacaaggttgtcgattccgcgtaagcatgcatacccaaggacgcctgttgcaattccaagtgagccagttccaacaatctttgtaatattagagcacttcattgtgttgcgcttgaaagtaaaatgcgaacaaattaagagataatctcgaaaccgcgacttcaaacgccaatatgatgtgcggcacacaataagcgttcatatccgctgggtgactttctcgctttaaaaaattatccgaaaaaattttctagagtgttgttactttatacttccggctcgtataatacgacaaggtgtaaggaggactaaaccatggctaaactcacctctgctgttccagtcctgactgctcgtgatgttgctggtgctgttgagttctggactgataggctcggtttctcccgtgacttcgtagaggacgactttgccggtgttgtacgtgacgacgttaccctgttcatctccgcagttcaggaccaggttgtgccagacaacactctggcatgggtatgggttcgtggtctggacgaactgtacgctgagtggtctgaggtcgtgtctaccaacttccgtgatgcatctggtccagctatgaccgagatcggtgaacagccctggggtcgtgagtttgcactgcgtgatccagctggtaactgcgtgcatttcgtcgcagaagagcaggactaacaattgacaccttacgattatttagagagtatttattagttttattgtatgtatacggatgttttattatctatttatgcccttatattctgtaactatccaaaagtcctatcttatcaagccagcaatctatgtccgcgaacgtcaactaaaaataagctttttatgctcttctctctttttttcccttcggtataattataccttgcatccacagattctcctgccaaattttgcataatcctttacaacatggctatatgggagcacttagcgccctccaaaacccatattgcctacgcatgtataggtgttttttccacaatattttctctgtgctctctttttattaaagagaagctctatatcggagaagcttctgtggccgttatattcggccttatcgtgggaccacattgcctgaattggtttgccccggaagattggggaaacttggatctgattaccttagctgcagaaaagggtaccactgagcgtcagaccccgtagaaaagatcaaaggatcttcttgagatcctttttttctgcgcgtaatctgctgcttgcaaacaaaaaaaccaccgctaccagcggtggtttgtttgccggatcaagagctaccaactctttttccgaaggtaactggcttcagcagagcgcagataccaaatactgttcttctagtgtagccgtagttaggccaccacttcaagaactctgtagcaccgcctacatacctcgctctgctaatcctgttaccagtggctgctgccagtggcgataagtcgtgtcttaccgggttggacccaagacgatagttaccggataaggcgcagcggtcgggctgaacggggggttcgtgcacacagcccagcttggagcgaacgacctacaccgaactgagatacctacagcgtgagctatgagaaagcgccacgcttcccgaagggagaaaggcggacaggtatccggtaagcggcagggtcggaacaggagagcgcacgagggagcttccagggggaaacgcctggtatctttatagtcctgtcgggtttcgccacctctgacttgagcgtcgatttttgtgatgctcgtcaggggggcggagcctatggaaaaacgccagcaacgcggcctttttacggttcctggccttttgctggccttttgctcacatgtatttcagaagcgatagagagactgcgctaagcattaatgagattatttttgagcattcgtcaatcaataccaaacaagacaaacggtatgccgacttttggaagtttctttttgaccaactggccgttagcatttcaacgaaccaaacttagttcatcttggatgagatcacgcttttgtcatattaggttccaagacagcgtttaaactgtcagttttgggccatttggggaacatgaaactatttgaccccacactcagaaagccctcatctggagtgatgttcgggtgtaatgcggagcttgttgcattcggaaataaacaaacatgaacctcgccaggggggccaggatagacaggctaataaagtcatggtgttagtagcctaatagaaggaattggaatatttaaataatgtatctaaacgcaaactccgagctggaaaaatgttaccggcgatgcgcggacaatttagaggcggcgatcaagaaacacctgctgggcgagcagtctggagcacagtcttcgatgggcccgagatccgataaccgtgctgggtaccgggacgtgaggcagcgcgacatccatcaaatataccaggcgccaaccgagtctctcggaaaacagcttctggatatcttccgctggcggcgcaacgacgaataatagtccctggaggtgacggaatatatatgtgtggagggtaaatctgacagggtgtagcaaaggtaatattttcctaaaacatgcaatcggctgccccgcaacgggaaaaagaatgactttggcactcttcaccagagtggggtgtcccgctcgtgtgtgcaaataggctcccactggtcaccccggattttgcagaaaaacagcaagttccggggtgtctcactggtgtccgccaataagaggagccggcaggcacggagtctacatcaagctgtctccgatacactcgactaccatccgggtctctcagagaggggaatggcactataaataccgcctccttgcgctctctgccttcatcaatcaaatcatgtacaggaacttaataattgctactgcccttacttgcggtgcatacagtgcctacgtgccttccgaaccatggagcacactgacacctgatgctagccttgaaagtgccctcaaagattactcacaaacttttggaatagctattaagtccttagatgccgacaagattaagagagacgtcaaatctggtgttgctgttggaggtttagcaggctaccctggtcccgcagggcccccaggtccgccgggtccgcccggaacatcaggtcatcccggaagccctggttcaccaggttatcagggaccgcccggagagcctggacaagctggtccctccggaccccctggtccaccaggtgctattggaccaagtggtcctgccggaaaagacggtgaatccggtagacctggtagacccggcgaaaggggtttaccaggtcctcccggaattaagggtccagccggtatacccggttttcctgggatgaagggtcacagaggatttgatggtagaaacggagagaaaggcgaaaccggtgctcccggactgaagggtgaaaacggtcttcctggtgagaacggcgctcctggacctatgggtccacgtggtgctccaggagaaagaggcagaccaggattgcctggtgcagctggtgctagaggtaacgatggtgcccgtggttccgatggacaacccgggccacccggccctccaggtaccgctggatttcctggaagccctggtgctaagggggaggttggtccggctggtagtcccggaagtaacggtgccccaggtcaaagaggcgaaccaggccctcagggtcacgcaggagcacagggaccgcctggtcctcctggtattaatggttcgcctggaggaaaaggtgaaatggggcccgcaggaatccccggtgcgcctggtcttatgggtgccaggggtcctccaggcccggccggtgcaaatggtgctcccggattacgaggaggagctggtgaacctggtaaaaacggtgccaaaggagaaccaggtcctcgtggagagcgtggtgaagctggcattcccggtgtgcctggtgcaaaaggtgaggacggtaaggacggttcccctggtgagccaggtgcgaacggactgccaggtgcagccggagagcgaggagctccaggattcaggggaccagccggtcctaacggcattcctggtgaaaaagggcccgccggtgaaaggggagctcccggtccagcaggccctcgtggagcagctggtgagcctggacgtgacggtgaaccaggactgatgggtcctaggggtctgcccgggtcccctggcggtcctggacctgcaggaaaagaagggccagtgggtctgcctggtattgacggacgtccaggcccaattggccctgcaggtgcaaggggtgaacctggtgtcatgggtttccccggtccaaagggtaatgacggagacccgggtaaaaatggtgacaagggtcacgcaggtctggcaggagcaaggggtgcaccaggacctgacggtgagacaggtgcacaaggacctccaggacctcaaggtgtccaaggaggaaagggagaacaaggaccggcaggacctcctggatttcaaggtttgcctggtacaggaggccctgcaggagaagtcggtaagcctggagagcaaggactgcacggcgagtttggactgccaggtcccgcaggacctcgtggagagcgtggtgctccgggtgagcgtggtcctccggcaattgctggtattggtggagaaaaggccggcggtttcgctccatattatggttaatcaagaggatgtcagaatgccatttgcctgagagatgcaggcttcatttttgatacttttttatttgtaacctatatagtataggattttttttgtcattttgtttcttctcgtacgagcttgctcctgatcagcctatctcgcagctgatgaatatcttgtggtaggggtttgggaaaatcattcgagtttgatgtttttcttggtatttcccactcctcttcagagtacagaagattaagtgagacgttcgtttgtgctccgga

SEQ ID NO: 1048 - DNA, 5298 bp, Artificial Sequence
  Plasmid
ggatccttcagtaatgtcttgtttcttttgttgcagtggtgagccattttgacttcgtgaaagtttctttagaatagttgtttccagaggccaaacattccacccgtagtaaagtgcaagcgtaggaagaccaagactggcataaatcaggtataagtgtcgagcactggcaggtgatcttctgaaagtttctactagcagataagatccagtagtcatgcatatggcaacaatgtaccgtgtggatctaagaacgcgtcctactaaccttcgcattcgttggtccagtttgttgttatcgatcaacgtgacaaggttgtcgattccgcgtaagcatgcatacccaaggacgcctgttgcaattccaagtgagccagttccaacaatctttgtaatattagagcacttcattgtgttgcgcttgaaagtaaaatgcgaacaaattaagagataatctcgaaaccgcgacttcaaacgccaatatgatgtgcggcacacaataagcgttcatatccgctgggtgactttctcgctttaaaaaattatccgaaaaaattttctagagtgttgttactttatacttccggctcgtataatacgacaaggtgtaaggaggactaaaccatggctaaactcacctctgctgttccagtcctgactgctcgtgatgttgctggtgctgttgagttctggactgataggctcggtttctcccgtgacttcgtagaggacgactttgccggtgttgtacgtgacgacgttaccctgttcatctccgcagttcaggaccaggttgtgccagacaacactctggcatgggtatgggttcgtggtctggacgaactgtacgctgagtggtctgaggtcgtgtctaccaacttccgtgatgcatctggtccagctatgaccgagatcggtgaacagccctggggtcgtgagtttgcactgcgtgatccagctggtaactgcgtgcatttcgtcgcagaagagcaggactaacaattgacaccttacgattatttagagagtatttattagttttattgtatgtatacggatgttttattatctatttatgcccttatattctgtaactatccaaaagtcctatcttatcaagccagcaatctatgtccgcgaacgtcaactaaaaataagctttttatgctcttctctctttttttcccttcggtataattataccttgcatccacagattctcctgccaaattttgcataatcctttacaacatggctatatgggagcacttagcgccctccaaaacccatattgcctacgcatgtataggtgttttttccacaatattttctctgtgctctctttttattaaagagaagctctatatcggagaagcttctgtggccgttatattcggccttatcgtgggaccacattgcctgaattggtttgccccggaagattggggaaacttggatctgattaccttagctgcagaaaagggtaccactgagcgtcagaccccgtagaaaagatcaaaggatcttcttgagatcctttttttctgcgcgtaatctgctgcttgcaaacaaaaaaaccaccgctaccagcggtggtttgtttgccggatcaagagctaccaactctttttccgaaggtaactggcttcagcagagcgcagataccaaatactgttcttctagtgtagccgtagttaggccaccacttcaagaactctgtagcaccgcctacatacctcgctctgctaatcctgttaccagtggctgctgccagtggcgataagtcgtgtcttaccgggttggacccaagacgatagttaccggataaggcgcagcggtcgggctgaacggggggttcgtgcacacagcccagcttggagcgaacgacctacaccgaactgagatacctacagcgtgagctatgagaaagcgccacgcttcccgaagggagaaaggcggacaggtatccggtaagcggcagggtcggaacaggagagcgcacgagggagcttccagggggaaacgcctggtatctttatagtcctgtcgggtttcgccacctctgacttgagcgtcgatttttgtgatgctcgtcaggggggcggagcctatggaaaaacgccagcaacgcggcctttttacggttcctggccttttgctggccttttgctcacatgtatttcagaagcgatagagagactgcgctaagcattaatgagattatttttgagcattcgtcaatcaataccaaacaagacaaacggtatgccgacttttggaagtttctttttgaccaactggccgttagcatttcaacgaaccaaacttagttcatcttggatgagatcacgcttttgtcatattaggttccaagacagcgtttaaactgtcagttttgggccatttggggaacatgaaactatttgaccccacactcagaaagccctcatctggagtgatgttcgggtgtaatgcggagcttgttgcattcggaaataaacaaacatgaacctcgccaggggggccaggatagacaggctaataaagtcatggtgttagtagcctaatagaaggaattggaatatttaaataatgtatctaaacgcaaactccgagctggaaaaatgttaccggcgatgcgcggacaatttagaggcggcgatcaagaaacacctgctgggcgagcagtctggagcacagtcttcgatgggcccgagatccgataaccgtgctgggtaccgggacgtgaggcagcgcgacatccatcaaatataccaggcgccaaccgagtctctcggaaaacagcttctggatatcttccgctggcggcgcaacgacgaataatagtccctggaggtgacggaatatatatgtgtggagggtaaatctgacagggtgtagcaaaggtaatattttcctaaaacatgcaatcggctgccccgcaacgggaaaaagaatgactttggcactcttcaccagagtggggtgtcccgctcgtgtgtgcaaataggctcccactggtcaccccggattttgcagaaaaacagcaagttccggggtgtctcactggtgtccgccaataagaggagccggcaggcacggagtctacatcaagctgtctccgatacactcgactaccatccgggtctctcagagaggggaatggcactataaataccgcctccttgcgctctctgccttcatcaatcaaatcatgtacaggaacttaataattgctactgcccttacttgcggtgcatacagtgcctacgtgccttccgaaccatggagcacactgacacctgatgctagccttgaaagtgccctcaaagattactcacaaacttttggaatagctattaagtccttagatgccgacaagattaagagagacgtcaaatctggtgttgctgttggaggtttagcaggctaccctggtcccgcagggcccccaggtccgccgggtccgcccggaacatcaggtcatcccggaagccctggttcaccaggttatcagggaccgcccggagagcctggacaagctggtccctccggaccccctggtccaccaggtgctattggaccaagtggtcctgccggaaaaagaggtgaatccggtagacctggtagacccggcgaaaggggtttaccaggtcctcccggaattaagggtccagccggtatacccggttttcctgggatgaagggtcacagaggatttagaggtagaaacggagagaaaggcgaaaccggtgctcccggactgaagggtgaaaacggtcttcctggtgagaacggcgctcctggacctatgggtccacgtggtgctccaggagaaagaggcagaccaggattgcctggtgcagctggtgctagaggtaacagaggtgcccgtggttccgatggacaacccgggccacccggccctccaggtaccgctggatttcctggaagccctggtgctaaggggagagttggtccggctggtagtcccggaagtaacggtgccccaggtcaaagaggcgaaccaggccctcagggtcacgcaggagcacagggaccgcctggtcctcctggtattaatggttcgcctggaggaaaaggtgaaatggggcccgcaggaatccccggtgcgcctggtcttatgggtgccaggggtcctccaggcccggccggtgcaaatggtgctcccggattacgaggaggagctggtagacctggtaaaaacggtgccaaaggagaaccaggtcctcgtggagagcgtggtagagctggcattcccggtgtgcctggtgcaaaaggtgagcgtggtaaggacggttcccctggtgagccaggtgcgaacggactgccaggtgcagccggagagcgaggagctccaggattcaggggaccagccggtcctaacggcattcctggtgaaaaagggcccgccggtgaaaggggagctcccggtccagcaggccctcgtggagcagctggtgagcctggacgtagaggtgtcccaggagggccaggtatgaggggtatgcccgggtcccctggcggtcctggatcgagaggaaaaccagggccaccaggttcgcagggtgaaagcggacgtccaggcccacccggcccttcaggtccaaggggtcagcctggtgtcatgggtttccccggtccaaagggtaatgacggagcaccgggtaaaaatggtgaacgtggtggcccaggtggtccaggaccccaaggtccaccaggaaaaaacggtgagacaggtcctcaaggacctccaggacctaccggtcctggaggaagaaagggagatacgggaccgccaggacctcaaggattgcaaggtttgcctggtacaggaggccctcccggagaaaatggtaagcctggaagaccaggaccaaaaggcgatgctggagccccaggtgcacccggaggtaagggacgtgccggtgctccgggtgagcgtggtcctccggcaattgctggtattggtggagaaaaggccggcggtttcgctccatattatggttaatcaagaggatgtcagaatgccatttgcctgagagatgcaggcttcatttttgatacttttttatttgtaacctatatagtataggattttttttgtcattttgtttcttctcgtacgagcttgctcctgatcagcctatctcgcagctgatgaatatcttgtggtaggggtttgggaaaatcattcgagtttgatgtttttcttggtatttcccactcctcttcagagtacagaagattaagtgagacgttcgtttgtgctccgga

SEQ ID NO: 1049 - DNA, 5298 bp, Artificial Sequence
  Plasmid
ggatccttcagtaatgtcttgtttcttttgttgcagtggtgagccattttgacttcgtgaaagtttctttagaatagttgtttccagaggccaaacattccacccgtagtaaagtgcaagcgtaggaagaccaagactggcataaatcaggtataagtgtcgagcactggcaggtgatcttctgaaagtttctactagcagataagatccagtagtcatgcatatggcaacaatgtaccgtgtggatctaagaacgcgtcctactaaccttcgcattcgttggtccagtttgttgttatcgatcaacgtgacaaggttgtcgattccgcgtaagcatgcatacccaaggacgcctgttgcaattccaagtgagccagttccaacaatctttgtaatattagagcacttcattgtgttgcgcttgaaagtaaaatgcgaacaaattaagagataatctcgaaaccgcgacttcaaacgccaatatgatgtgcggcacacaataagcgttcatatccgctgggtgactttctcgctttaaaaaattatccgaaaaaattttctagagtgttgttactttatacttccggctcgtataatacgacaaggtgtaaggaggactaaaccatggctaaactcacctctgctgttccagtcctgactgctcgtgatgttgctggtgctgttgagttctggactgataggctcggtttctcccgtgacttcgtagaggacgactttgccggtgttgtacgtgacgacgttaccctgttcatctccgcagttcaggaccaggttgtgccagacaacactctggcatgggtatgggttcgtggtctggacgaactgtacgctgagtggtctgaggtcgtgtctaccaacttccgtgatgcatctggtccagctatgaccgagatcggtgaacagccctggggtcgtgagtttgcactgcgtgatccagctggtaactgcgtgcatttcgtcgcagaagagcaggactaacaattgacaccttacgattatttagagagtatttattagttttattgtatgtatacggatgttttattatctatttatgcccttatattctgtaactatccaaaagtcctatcttatcaagccagcaatctatgtccgcgaacgtcaactaaaaataagctttttatgctcttctctctttttttcccttcggtataattataccttgcatccacagattctcctgccaaattttgcataatcctttacaacatggctatatgggagcacttagcgccctccaaaacccatattgcctacgcatgtataggtgttttttccacaatattttctctgtgctctctttttattaaagagaagctctatatcggagaagcttctgtggccgttatattcggccttatcgtgggaccacattgcctgaattggtttgccccggaagattggggaaacttggatctgattaccttagctgcagaaaagggtaccactgagcgtcagaccccgtagaaaagatcaaaggatcttcttgagatcctttttttctgcgcgtaatctgctgcttgcaaacaaaaaaaccaccgctaccagcggtggtttgtttgccggatcaagagctaccaactctttttccgaaggtaactggcttcagcagagcgcagataccaaatactgttcttctagtgtagccgtagttaggccaccacttcaagaactctgtagcaccgcctacatacctcgctctgctaatcctgttaccagtggctgctgccagtggcgataagtcgtgtcttaccgggttggacccaagacgatagttaccggataaggcgcagcggtcgggctgaacggggggttcgtgcacacagcccagcttggagcgaacgacctacaccgaactgagatacctacagcgtgagctatgagaaagcgccacgcttcccgaagggagaaaggcggacaggtatccggtaagcggcagggtcggaacaggagagcgcacgagggagcttccagggggaaacgcctggtatctttatagtcctgtcgggtttcgccacctctgacttgagcgtcgatttttgtgatgctcgtcaggggggcggagcctatggaaaaacgccagcaacgcggcctttttacggttcctggccttttgctggccttttgctcacatgtatttcagaagcgatagagagactgcgctaagcattaatgagattatttttgagcattcgtcaatcaataccaaacaagacaaacggtatgccgacttttggaagtttctttttgaccaactggccgttagcatttcaacgaaccaaacttagttcatcttggatgagatcacgcttttgtcatattaggttccaagacagcgtttaaactgtcagttttgggccatttggggaacatgaaactatttgaccccacactcagaaagccctcatctggagtgatgttcgggtgtaatgcggagcttgttgcattcggaaataaacaaacatgaacctcgccaggggggccaggatagacaggctaataaagtcatggtgttagtagcctaatagaaggaattggaatatttaaataatgtatctaaacgcaaactccgagctggaaaaatgttaccggcgatgcgcggacaatttagaggcggcgatcaagaaacacctgctgggcgagcagtctggagcacagtcttcgatgggcccgagatccgataaccgtgctgggtaccgggacgtgaggcagcgcgacatccatcaaatataccaggcgccaaccgagtctctcggaaaacagcttctggatatcttccgctggcggcgcaacgacgaataatagtccctggaggtgacggaatatatatgtgtggagggtaaatctgacagggtgtagcaaaggtaatattttcctaaaacatgcaatcggctgccccgcaacgggaaaaagaatgactttggcactcttcaccagagtggggtgtcccgctcgtgtgtgcaaataggctcccactggtcaccccggattttgcagaaaaacagcaagttccggggtgtctcactggtgtccgccaataagaggagccggcaggcacggagtctacatcaagctgtctccgatacactcgactaccatccgggtctctcagagaggggaatggcactataaataccgcctccttgcgctctctgccttcatcaatcaaatcatgtacaggaacttaataattgctactgcccttacttgcggtgcatacagtgcctacgtgccttccgaaccatggagcacactgacacctgatgctagccttgaaagtgccctcaaagattactcacaaacttttggaatagctattaagtccttagatgccgacaagattaagagagacgtcaaatctggtgttgctgttggaggtttagcaggctaccctggtcccgcagggcccccaggtccgccgggtccgcccggagcatcaggtcatcccggaagccctggttcaccaggttatcagggaccgcccggagagcctggacaagctggtcccgcaggaccccctggtccaccaggtgctattggaccaagtggtcctgccggaaaagacggtgaatccggtagacctggtagacccggcgaaaggggtttaccaggtcctcccggaattaagggtccagccggtatacccggttttcctgggatgaagggtcacagaggatttgatggtagaaacggagagaaaggcgaagcaggtgctcccggactgaagggtgaaaacggtcttcctggtgagaacggcgctcctggacctatgggtccacgtggtgctccaggagaaagaggcagaccaggattgcctggtgcagctggtgctagaggtaacgatggtgcccgtggttccgatggacaacccgggccacccggccctccaggtgcagctggatttcctggagcacctggtgctaagggggaggttggtccggctggtagtcccggaagtaacggtgccccaggtcaaagaggcgaaccaggccctcagggtcacgcaggagcacagggaccgcctggtcctcctggtattaatggttcgcctggaggaaaaggtgaaatggggcccgcaggaatccccggtgcgcctggtcttatgggtgccaggggtcctccaggcccggccggtgcaaatggtgctcccggattacgaggaggagctggtgaacctggtaaaaacggtgccaaaggagaaccaggtcctcgtggagagcgtggtgaagctggcattcccggtgtgcctggtgcaaaaggtgaggacggtaaggacggttcccctggtgagccaggtgcgaacggactgccaggtgcagccggagagcgaggagctccaggattcaggggaccagccggtcctaacggcattcctggtgaaaaagggcccgccggtgaaaggggagctcccggtccagcaggccctcgtggagcagctggtgagcctggacgtgacggtgtcccaggagggccaggtatgaggggtatgcccgggtcccctggcggtcctggatcggatggaaaaccagggccaccaggtgcacagggtgaaagcggacgtccaggcccacccggcccttcaggtccaaggggtcagcctggtgtcatgggtttccccggtccaaagggtaatgacggagcaccgggtaaaaatggtgaacgtggtggcccaggtggtccaggaccccaaggtccaccaggaaaaaacggtgagacaggtcctcaaggacctccaggacctaccggtcctggaggagataagggagatacgggaccgccaggacctcaaggattgcaaggtttgcctggtacaggaggccctcccggagaaaatggtaagcctggagagccaggaccaaaaggcgatgctggagccccaggtgcacccggaggtaagggagacgccggtgctccgggtgagcgtggtcctccggcaattgctggtattggtggagaaaaggccggcggtttcgctccatattatggttaatcaagaggatgtcagaatgccatttgcctgagagatgcaggcttcatttttgatacttttttatttgtaacctatatagtataggattttttttgtcattttgtttcttctcgtacgagcttgctcctgatcagcctatctcgcagctgatgaatatcttgtggtaggggtttgggaaaatcattcgagtttgatgtttttcttggtatttcccactcctcttcagagtacagaagattaagtgagacgttcgtttgtgctccgga

SEQ ID NO: 1050 - DNA, 5298 bp, Artificial Sequence
  Plasmid
ggatccttcagtaatgtcttgtttcttttgttgcagtggtgagccattttgacttcgtgaaagtttctttagaatagttgtttccagaggccaaacattccacccgtagtaaagtgcaagcgtaggaagaccaagactggcataaatcaggtataagtgtcgagcactggcaggtgatcttctgaaagtttctactagcagataagatccagtagtcatgcatatggcaacaatgtaccgtgtggatctaagaacgcgtcctactaaccttcgcattcgttggtccagtttgttgttatcgatcaacgtgacaaggttgtcgattccgcgtaagcatgcatacccaaggacgcctgttgcaattccaagtgagccagttccaacaatctttgtaatattagagcacttcattgtgttgcgcttgaaagtaaaatgcgaacaaattaagagataatctcgaaaccgcgacttcaaacgccaatatgatgtgcggcacacaataagcgttcatatccgctgggtgactttctcgctttaaaaaattatccgaaaaaattttctagagtgttgttactttatacttccggctcgtataatacgacaaggtgtaaggaggactaaaccatggctaaactcacctctgctgttccagtcctgactgctcgtgatgttgctggtgctgttgagttctggactgataggctcggtttctcccgtgacttcgtagaggacgactttgccggtgttgtacgtgacgacgttaccctgttcatctccgcagttcaggaccaggttgtgccagacaacactctggcatgggtatgggttcgtggtctggacgaactgtacgctgagtggtctgaggtcgtgtctaccaacttccgtgatgcatctggtccagctatgaccgagatcggtgaacagccctggggtcgtgagtttgcactgcgtgatccagctggtaactgcgtgcatttcgtcgcagaagagcaggactaacaattgacaccttacgattatttagagagtatttattagttttattgtatgtatacggatgttttattatctatttatgcccttatattctgtaactatccaaaagtcctatcttatcaagccagcaatctatgtccgcgaacgtcaactaaaaataagctttttatgctcttctctctttttttcccttcggtataattataccttgcatccacagattctcctgccaaattttgcataatcctttacaacatggctatatgggagcacttagcgccctccaaaacccatattgcctacgcatgtataggtgttttttccacaatattttctctgtgctctctttttattaaagagaagctctatatcggagaagcttctgtggccgttatattcggccttatcgtgggaccacattgcctgaattggtttgccccggaagattggggaaacttggatctgattaccttagctgcagaaaagggtaccactgagcgtcagaccccgtagaaaagatcaaaggatcttcttgagatcctttttttctgcgcgtaatctgctgcttgcaaacaaaaaaaccaccgctaccagcggtggtttgtttgccggatcaagagctaccaactctttttccgaaggtaactggcttcagcagagcgcagataccaaatactgttcttctagtgtagccgtagttaggccaccacttcaagaactctgtagcaccgcctacatacctcgctctgctaatcctgttaccagtggctgctgccagtggcgataagtcgtgtcttaccgggttggacccaagacgatagttaccggataaggcgcagcggtcgggctgaacggggggttcgtgcacacagcccagcttggagcgaacgacctacaccgaactgagatacctacagcgtgagctatgagaaagcgccacgcttcccgaagggagaaaggcggacaggtatccggtaagcggcagggtcggaacaggagagcgcacgagggagcttccagggggaaacgcctggtatctttatagtcctgtcgggtttcgccacctctgacttgagcgtcgatttttgtgatgctcgtcaggggggcggagcctatggaaaaacgccagcaacgcggcctttttacggttcctggccttttgctggccttttgctcacatgtatttcagaagcgatagagagactgcgctaagcattaatgagattatttttgagcattcgtcaatcaataccaaacaagacaaacggtatgccgacttttggaagtttctttttgaccaactggccgttagcatttcaacgaaccaaacttagttcatcttggatgagatcacgcttttgtcatattaggttccaagacagcgtttaaactgtcagttttgggccatttggggaacatgaaactatttgaccccacactcagaaagccctcatctggagtgatgttcgggtgtaatgcggagcttgttgcattcggaaataaacaaacatgaacctcgccaggggggccaggatagacaggctaataaagtcatggtgttagtagcctaatagaaggaattggaatatttaaataatgtatctaaacgcaaactccgagctggaaaaatgttaccggcgatgcgcggacaatttagaggcggcgatcaagaaacacctgctgggcgagcagtctggagcacagtcttcgatgggcccgagatccgataaccgtgctgggtaccgggacgtgaggcagcgcgacatccatcaaatataccaggcgccaaccgagtctctcggaaaacagcttctggatatcttccgctggcggcgcaacgacgaataatagtccctggaggtgacggaatatatatgtgtggagggtaaatctgacagggtgtagcaaaggtaatattttcctaaaacatgcaatcggctgccccgcaacgggaaaaagaatgactttggcactcttcaccagagtggggtgtcccgctcgtgtgtgcaaataggctcccactggtcaccccggattttgcagaaaaacagcaagttccggggtgtctcactggtgtccgccaataagaggagccggcaggcacggagtctacatcaagctgtctccgatacactcgactaccatccgggtctctcagagaggggaatggcactataaataccgcctccttgcgctctctgccttcatcaatcaaatcatgtacaggaacttaataattgctactgcccttacttgcggtgcatacagtgcctacgtgccttccgaaccatggagcacactgacacctgatgctagccttgaaagtgccctcaaagattactcacaaacttttggaatagctattaagtccttagatgccgacaagattaagagagacgtcaaatctggtgttgctgttggaggtttagcaggctaccctggtcccgcagggcccccaggtccgccgggtccgcccggaaactcaggtcatcccggaagccctggttcaccaggttatcagggaccgcccggagagcctggacaagctggtcccaacggaccccctggtccaccaggtgctattggaccaagtggtcctgccggaaaagacggtgaatccggtagacctggtagacccggcgaaaggggtttaccaggtcctcccggaattaagggtccagccggtatacccggttttcctgggatgaagggtcacagaggatttgatggtagaaacggagagaaaggcgaaaacggtgctcccggactgaagggtgaaaacggtcttcctggtgagaacggcgctcctggacctatgggtccacgtggtgctccaggagaaagaggcagaccaggattgcctggtgcagctggtgctagaggtaacgatggtgcccgtggttccgatggacaacccgggccacccggccctccaggtaacgctggatttcctggaaaccctggtgctaagggggaggttggtccggctggtagtcccggaagtaacggtgccccaggtcaaagaggcgaaccaggccctcagggtcacgcaggagcacagggaccgcctggtcctcctggtattaatggttcgcctggaggaaaaggtgaaatggggcccgcaggaatccccggtgcgcctggtcttatgggtgccaggggtcctccaggcccggccggtgcaaatggtgctcccggattacgaggaggagctggtgaacctggtaaaaacggtgccaaaggagaaccaggtcctcgtggagagcgtggtgaagctggcattcccggtgtgcctggtgcaaaaggtgaggacggtaaggacggttcccctggtgagccaggtgcgaacggactgccaggtgcagccggagagcgaggagctccaggattcaggggaccagccggtcctaacggcattcctggtgaaaaagggcccgccggtgaaaggggagctcccggtccagcaggccctcgtggagcagctggtgagcctggacgtgacggtgtcccaggagggccaggtatgaggggtatgcccgggtcccctggcggtcctggatcggatggaaaaccagggccaccaggtaaccagggtgaaagcggacgtccaggcccacccggcccttcaggtccaaggggtcagcctggtgtcatgggtttccccggtccaaagggtaatgacggagcaccgggtaaaaatggtgaacgtggtggcccaggtggtccaggaccccaaggtccaccaggaaaaaacggtgagacaggtcctcaaggacctccaggacctaccggtcctggaggagataagggagatacgggaccgccaggacctcaaggattgcaaggtttgcctggtacaggaggccctcccggagaaaatggtaagcctggagagccaggaccaaaaggcgatgctggagccccaggtgcacccggaggtaagggagacgccggtgctccgggtgagcgtggtcctccggcaattgctggtattggtggagaaaaggccggcggtttcgctccatattatggttaatcaagaggatgtcagaatgccatttgcctgagagatgcaggcttcatttttgatacttttttatttgtaacctatatagtataggattttttttgtcattttgtttcttctcgtacgagcttgctcctgatcagcctatctcgcagctgatgaatatcttgtggtaggggtttgggaaaatcattcgagtttgatgtttttcttggtatttcccactcctcttcagagtacagaagattaagtgagacgttcgtttgtgctccgga

SEQ ID NO: 1051 - DNA, 5298 bp, Artificial Sequence; identical to SEQ ID NO: 1046
  Plasmid

SEQ ID NO: 1052 - DNA, 5307 bp, Artificial Sequence
  Plasmid
ggatccttcagtaatgtcttgtttcttttgttgcagtggtgagccattttgacttcgtgaaagtttctttagaatagttgtttccagaggccaaacattccacccgtagtaaagtgcaagcgtaggaagaccaagactggcataaatcaggtataagtgtcgagcactggcaggtgatcttctgaaagtttctactagcagataagatccagtagtcatgcatatggcaacaatgtaccgtgtggatctaagaacgcgtcctactaaccttcgcattcgttggtccagtttgttgttatcgatcaacgtgacaaggttgtcgattccgcgtaagcatgcatacccaaggacgcctgttgcaattccaagtgagccagttccaacaatctttgtaatattagagcacttcattgtgttgcgcttgaaagtaaaatgcgaacaaattaagagataatctcgaaaccgcgacttcaaacgccaatatgatgtgcggcacacaataagcgttcatatccgctgggtgactttctcgctttaaaaaattatccgaaaaaattttctagagtgttgttactttatacttccggctcgtataatacgacaaggtgtaaggaggactaaaccatggctaaactcacctctgctgttccagtcctgactgctcgtgatgttgctggtgctgttgagttctggactgataggctcggtttctcccgtgacttcgtagaggacgactttgccggtgttgtacgtgacgacgttaccctgttcatctccgcagttcaggaccaggttgtgccagacaacactctggcatgggtatgggttcgtggtctggacgaactgtacgctgagtggtctgaggtcgtgtctaccaacttccgtgatgcatctggtccagctatgaccgagatcggtgaacagccctggggtcgtgagtttgcactgcgtgatccagctggtaactgcgtgcatttcgtcgcagaagagcaggactaacaattgacaccttacgattatttagagagtatttattagttttattgtatgtatacggatgttttattatctatttatgcccttatattctgtaactatccaaaagtcctatcttatcaagccagcaatctatgtccgcgaacgtcaactaaaaataagctttttatgctcttctctctttttttcccttcggtataattataccttgcatccacagattctcctgccaaattttgcataatcctttacaacatggctatatgggagcacttagcgccctccaaaacccatattgcctacgcatgtataggtgttttttccacaatattttctctgtgctctctttttattaaagagaagctctatatcggagaagcttctgtggccgttatattcggccttatcgtgggaccacattgcctgaattggtttgccccggaagattggggaaacttggatctgattaccttagctgcagaaaagggtaccactgagcgtcagaccccgtagaaaagatcaaaggatcttcttgagatcctttttttctgcgcgtaatctgctgcttgcaaacaaaaaaaccaccgctaccagcggtggtttgtttgccggatcaagagctaccaactctttttccgaaggtaactggcttcagcagagcgcagataccaaatactgttcttctagtgtagccgtagttaggccaccacttcaagaactctgtagcaccgcctacatacctcgctctgctaatcctgttaccagtggctgctgccagtggcgataagtcgtgtcttaccgggttggacccaagacgatagttaccggataaggcgcagcggtcgggctgaacggggggttcgtgcacacagcccagcttggagcgaacgacctacaccgaactgagatacctacagcgtgagctatgagaaagcgccacgcttcccgaagggagaaaggcggacaggtatccggtaagcggcagggtcggaacaggagagcgcacgagggagcttccagggggaaacgcctggtatctttatagtcctgtcgggtttcgccacctctgacttgagcgtcgatttttgtgatgctcgtcaggggggcggagcctatggaaaaacgccagcaacgcggcctttttacggttcctggccttttgctggccttttgctcacatgtatttcagaagcgatagagagactgcgctaagcattaatgagattatttttgagcattcgtcaatcaataccaaacaagacaaacggtatgccgacttttggaagtttctttttgaccaactggccgttagcatttcaacgaaccaaacttagttcatcttggatgagatcacgcttttgtcatattaggttccaagacagcgtttaaactgtcagttttgggccatttggggaacatgaaactatttgaccccacactcagaaagccctcatctggagtgatgttcgggtgtaatgcggagcttgttgcattcggaaataaacaaacatgaacctcgccaggggggccaggatagacaggctaataaagtcatggtgttagtagcctaatagaaggaattggaatatttaaataatgtatctaaacgcaaactccgagctggaaaaatgttaccggcgatgcgcggacaatttagaggcggcgatcaagaaacacctgctgggcgagcagtctggagcacagtcttcgatgggcccgagatccgataaccgtgctgggtaccgggacgtgaggcagcgcgacatccatcaaatataccaggcgccaaccgagtctctcggaaaacagcttctggatatcttccgctggcggcgcaacgacgaataatagtccctggaggtgacggaatatatatgtgtggagggtaaatctgacagggtgtagcaaaggtaatattttcctaaaacatgcaatcggctgccccgcaacgggaaaaagaatgactttggcactcttcaccagagtggggtgtcccgctcgtgtgtgcaaataggctcccactggtcaccccggattttgcagaaaaacagcaagttccggggtgtctcactggtgtccgccaataagaggagccggcaggcacggagtctacatcaagctgtctccgatacactcgactaccatccgggtctctcagagaggggaatggcactataaataccgcctccttgcgctctctgccttcatcaatcaaatcatgtacaggaacttaataattgctactgcccttacttgcggtgcatacagtgcctacgtgccttccgaaccatggagcacactgacacctgatgctagccttgaaagtgccctcaaagattactcacaaacttttggaatagctattaagtccttagatgccgacaagattaagagagatagctacgacgtcaaatctggtgttgctgtcggaggtttagcaggctaccctggtcccgcagggcccccaggtccgccgggtccgcccggaacatcaggtcatcccggaagccctggttcaccaggttatcagggaccgcccggagagcctggacaagctggtccctccggaccccctggtccaccaggtgctattggaccaagtggtcctgccggaaaagacggtgaatccggtagacctggtagacccggcgaaaggggtttaccaggtcctcccggaattaagggtccagccggtatacccggttttcctgggatgaagggtcacagaggatttgatggtagaaacggagagaaaggcgaaaccggtgctcccggactgaagggtgaaaacggtcttcctggtgagaacggcgctcctggacctatgggtccacgtggtgctccaggagaaagaggcagaccaggattgcctggtgcagctggtgctagaggtaacgatggtgcccgtggttccgatggacaacccgggccacccggccctccaggtaccgctggatttcctggaagccctggtgctaagggggaggttggtccggctggtagtcccggaagtaacggtgccccaggtcaaagaggcgaaccaggccctcagggtcacgcaggagcacagggaccgcctggtcctcctggtattaatggttcgcctggaggaaaaggtgaaatggggcccgcaggaatccccggtgcgcctggtcttatgggtgccaggggtcctccaggcccggccggtgcaaatggtgctcccggattacgaggaggagctggtgaacctggtaaaaacggtgccaaaggagaaccaggtcctcgtggagagcgtggtgaagctggcattcccggtgtgcctggtgcaaaaggtgaggacggtaaggacggttcccctggtgagccaggtgcgaacggactgccaggtgcagccggagagcgaggagctccaggattcaggggaccagccggtcctaacggcattcctggtgaaaaagggcccgccggtgaaaggggagctcccggtccagcaggccctcgtggagcagctggtgagcctggacgtgacggtgtcccaggagggccaggtatgaggggtatgcccgggtcccctggcggtcctggatcggatggaaaaccagggccaccaggttcgcagggtgaaagcggacgtccaggcccacccggcccttcaggtccaaggggtcagcctggtgtcatgggtttccccggtccaaagggtaatgacggagcaccgggtaaaaatggtgaacgtggtggcccaggtggtccaggaccccaaggtccaccaggaaaaaacggtgagacaggtcctcaaggacctccaggacctaccggtcctggaggagataagggagatacgggaccgccaggacctcaaggattgcaaggtttgcctggtacaggaggccctcccggagaaaatggtaagcctggagagccaggaccaaaaggcgatgctggagccccaggtgcacccggaggtaagggagacgccggtgctccgggtgagcgtggtcctccggcaattgctggtattggtggagaaaaggccggcggtttcgctccatattatggttaatcaagaggatgtcagaatgccatttgcctgagagatgcaggcttcatttttgatacttttttatttgtaacctatatagtataggattttttttgtcattttgtttcttctcgtacgagcttgctcctgatcagcctatctcgcagctgatgaatatcttgtggtaggggtttgggaaaatcattcgagtttgatgtttttcttggtatttcccactcctcttcagagtacagaagattaagtgagacgttcgtttgtgctccgga

SEQ ID NO: 1053 - DNA, 4614 bp, Artificial Sequence
  Plasmid seq
ggatccttcagtaatgtcttgtttcttttgttgcagtggtgagccattttgacttcgtgaaagtttctttagaatagttgtttccagaggccaaacattccacccgtagtaaagtgcaagcgtaggaagaccaagactggcataaatcaggtataagtgtcgagcactggcaggtgatcttctgaaagtttctactagcagataagatccagtagtcatgcatatggcaacaatgtaccgtgtggatctaagaacgcgtcctactaaccttcgcattcgttggtccagtttgttgttatcgatcaacgtgacaaggttgtcgattccgcgtaagcatgcatacccaaggacgcctgttgcaattccaagtgagccagttccaacaatctttgtaatattagagcacttcattgtgttgcgcttgaaagtaaaatgcgaacaaattaagagataatctcgaaaccgcgacttcaaacgccaatatgatgtgcggcacacaataagcgttcatatccgctgggtgactttctcgctttaaaaaattatccgaaaaaattttctagagtgttgttactttatacttccggctcgtataatacgacaaggtgtaaggaggactaaaccatggctaaactcacctctgctgttccagtcctgactgctcgtgatgttgctggtgctgttgagttctggactgataggctcggtttctcccgtgacttcgtagaggacgactttgccggtgttgtacgtgacgacgttaccctgttcatctccgcagttcaggaccaggttgtgccagacaacactctggcatgggtatgggttcgtggtctggacgaactgtacgctgagtggtctgaggtcgtgtctaccaacttccgtgatgcatctggtccagctatgaccgagatcggtgaacagccctggggtcgtgagtttgcactgcgtgatccagctggtaactgcgtgcatttcgtcgcagaagagcaggactaacaattgacaccttacgattatttagagagtatttattagttttattgtatgtatacggatgttttattatctatttatgcccttatattctgtaactatccaaaagtcctatcttatcaagccagcaatctatgtccgcgaacgtcaactaaaaataagctttttatgctcttctctctttttttcccttcggtataattataccttgcatccacagattctcctgccaaattttgcataatcctttacaacatggctatatgggagcacttagcgccctccaaaacccatattgcctacgcatgtataggtgttttttccacaatattttctctgtgctctctttttattaaagagaagctctatatcggagaagcttctgtggccgttatattcggccttatcgtgggaccacattgcctgaattggtttgccccggaagattggggaaacttggatctgattaccttagctgcagaaaagggtaccactgagcgtcagaccccgtagaaaagatcaaaggatcttcttgagatcctttttttctgcgcgtaatctgctgcttgcaaacaaaaaaaccaccgctaccagcggtggtttgtttgccggatcaagagctaccaactctttttccgaaggtaactggcttcagcagagcgcagataccaaatactgttcttctagtgtagccgtagttaggccaccacttcaagaactctgtagcaccgcctacatacctcgctctgctaatcctgttaccagtggctgctgccagtggcgataagtcgtgtcttaccgggttggacccaagacgatagttaccggataaggcgcagcggtcgggctgaacggggggttcgtgcacacagcccagcttggagcgaacgacctacaccgaactgagatacctacagcgtgagctatgagaaagcgccacgcttcccgaagggagaaaggcggacaggtatccggtaagcggcagggtcggaacaggagagcgcacgagggagcttccagggggaaacgcctggtatctttatagtcctgtcgggtttcgccacctctgacttgagcgtcgatttttgtgatgctcgtcaggggggcggagcctatggaaaaacgccagcaacgcggcctttttacggttcctggccttttgctggccttttgctcacatgtatttcagaagcgatagagagactgcgctaagcattaatgagattatttttgagcattcgtcaatcaataccaaacaagacaaacggtatgccgacttttggaagtttctttttgaccaactggccgttagcatttcaacgaaccaaacttagttcatcttggatgagatcacgcttttgtcatattaggttccaagacagcgtttaaactgtcagttttgggccatttggggaacatgaaactatttgaccccacactcagaaagccctcatctggagtgatgttcgggtgtaatgcggagcttgttgcattcggaaataaacaaacatgaacctcgccaggggggccaggatagacaggctaataaagtcatggtgttagtagcctaatagaaggaattggaatatttaaataatgtatctaaacgcaaactccgagctggaaaaatgttaccggcgatgcgcggacaatttagaggcggcgatcaagaaacacctgctgggcgagcagtctggagcacagtcttcgatgggcccgagatccgataaccgtgctgggtaccgggacgtgaggcagcgcgacatccatcaaatataccaggcgccaaccgagtctctcggaaaacagcttctggatatcttccgctggcggcgcaacgacgaataatagtccctggaggtgacggaatatatatgtgtggagggtaaatctgacagggtgtagcaaaggtaatattttcctaaaacatgcaatcggctgccccgcaacgggaaaaagaatgactttggcactcttcaccagagtggggtgtcccgctcgtgtgtgcaaataggctcccactggtcaccccggattttgcagaaaaacagcaagttccggggtgtctcactggtgtccgccaataagaggagccggcaggcacggagtctacatcaagctgtctccgatacactcgactaccatccgggtctctcagagaggggaatggcactataaataccgcctccttgcgctctctgccttcatcaatcaaatcatgtacaggaacttaataattgctactgcccttacttgcggtgcatacagtgcctacgtgccttccgaaccatggagcacactgacacctgatgctagccttgaaagtgccctcaaagattactcacaaacttttggaatagctattaagtccttagatgccgacaagattaagagagacgtcaaatctggtgttgctgttggaggtttagcaggctaccctggtcccgcagggcccccaggtccgccgggtccgcccggaacatcaggtcatcccggaagccctggttcaccaggttatcagggaccgcccggagagcctggacaagctggtccctccggaccccctggtccaccaggtgctattggaccaagtggtcctgccggaaaagacggtgaatccggtagacctggtagacccggcgaaaggggtttaccaggtcctcccggaattaagggtccagccggtatacccggttttcctgggatgaagggtcacagaggatttgatggtagaaacggagagaaaggcgaaaccggtgctcccggactgaagggtgaaaacggtcttcctggtgagaacggcgctcctggacctatgggtccacgtggtgctccaggagaaagaggcagaccaggattgcctggtgcagctggtgctagaggtaacgatggtgcccgtggttccgatggacaacccgggccacccggccctccaggtgctattggaccatctggtcctgctggaaaggatggagagtcaggtcgtccaggtcgtcctggagaaaggggcttgcctggacctcccggaattaagggaccagctggcattcccggcttccccggtatgaaaggacatagaggcttcgacggtcgtaatggtgagaaaggtgagaccggagcaccaggtttgaaaggagagaacggattacctggagaaaatggcgcccctggaccaatgggacctcgtggagctcctggagaacgtggtaggcctggattaccaggagcagccggcgcaagaggcaatgatggtgcacgtggttccgacggacagcctggtccaccaggaccccccgcaattgctggtattggtggagaaaaggccggcggtttcgctccatattatggttaatcaagaggatgtcagaatgccatttgcctgagagatgcaggcttcatttttgatacttttttatttgtaacctatatagtataggattttttttgtcattttgtttcttctcgtacgagcttgctcctgatcagcctatctcgcagctgatgaatatcttgtggtaggggtttgggaaaatcattcgagtttgatgtttttcttggtatttcccactcctcttcagagtacagaagattaagtgagacgttcgtttgtgctccgga

SEQ ID NO: 1054 - DNA, 4614 bp, Artificial Sequence; identical to SEQ ID NO: 1053
  Plasmid

SEQ ID NO: 1055 - DNA, 4974 bp, Artificial Sequence
  Plasmid
ggatccttcagtaatgtcttgtttcttttgttgcagtggtgagccattttgacttcgtgaaagtttctttagaatagttgtttccagaggccaaacattccacccgtagtaaagtgcaagcgtaggaagaccaagactggcataaatcaggtataagtgtcgagcactggcaggtgatcttctgaaagtttctactagcagataagatccagtagtcatgcatatggcaacaatgtaccgtgtggatctaagaacgcgtcctactaaccttcgcattcgttggtccagtttgttgttatcgatcaacgtgacaaggttgtcgattccgcgtaagcatgcatacccaaggacgcctgttgcaattccaagtgagccagttccaacaatctttgtaatattagagcacttcattgtgttgcgcttgaaagtaaaatgcgaacaaattaagagataatctcgaaaccgcgacttcaaacgccaatatgatgtgcggcacacaataagcgttcatatccgctgggtgactttctcgctttaaaaaattatccgaaaaaattttctagagtgttgttactttatacttccggctcgtataatacgacaaggtgtaaggaggactaaaccatggctaaactcacctctgctgttccagtcctgactgctcgtgatgttgctggtgctgttgagttctggactgataggctcggtttctcccgtgacttcgtagaggacgactttgccggtgttgtacgtgacgacgttaccctgttcatctccgcagttcaggaccaggttgtgccagacaacactctggcatgggtatgggttcgtggtctggacgaactgtacgctgagtggtctgaggtcgtgtctaccaacttccgtgatgcatctggtccagctatgaccgagatcggtgaacagccctggggtcgtgagtttgcactgcgtgatccagctggtaactgcgtgcatttcgtcgcagaagagcaggactaacaattgacaccttacgattatttagagagtatttattagttttattgtatgtatacggatgttttattatctatttatgcccttatattctgtaactatccaaaagtcctatcttatcaagccagcaatctatgtccgcgaacgtcaactaaaaataagctttttatgctcttctctctttttttcccttcggtataattataccttgcatccacagattctcctgccaaattttgcataatcctttacaacatggctatatgggagcacttagcgccctccaaaacccatattgcctacgcatgtataggtgttttttccacaatattttctctgtgctctctttttattaaagagaagctctatatcggagaagcttctgtggccgttatattcggccttatcgtgggaccacattgcctgaattggtttgccccggaagattggggaaacttggatctgattaccttagctgcagaaaagggtaccactgagcgtcagaccccgtagaaaagatcaaaggatcttcttgagatcctttttttctgcgcgtaatctgctgcttgcaaacaaaaaaaccaccgctaccagcggtggtttgtttgccggatcaagagctaccaactctttttccgaaggtaactggcttcagcagagcgcagataccaaatactgttcttctagtgtagccgtagttaggccaccacttcaagaactctgtagcaccgcctacatacctcgctctgctaatcctgttaccagtggctgctgccagtggcgataagtcgtgtcttaccgggttggacccaagacgatagttaccggataaggcgcagcggtcgggctgaacggggggttcgtgcacacagcccagcttggagcgaacgacctacaccgaactgagatacctacagcgtgagctatgagaaagcgccacgcttcccgaagggagaaaggcggacaggtatccggtaagcggcagggtcggaacaggagagcgcacgagggagcttccagggggaaacgcctggtatctttatagtcctgtcgggtttcgccacctctgacttgagcgtcgatttttgtgatgctcgtcaggggggcggagcctatggaaaaacgccagcaacgcggcctttttacggttcctggccttttgctggccttttgctcacatgtatttcagaagcgatagagagactgcgctaagcattaatgagattatttttgagcattcgtcaatcaataccaaacaagacaaacggtatgccgacttttggaagtttctttttgaccaactggccgttagcatttcaacgaaccaaacttagttcatcttggatgagatcacgcttttgtcatattaggttccaagacagcgtttaaactgtcagttttgggccatttggggaacatgaaactatttgaccccacactcagaaagccctcatctggagtgatgttcgggtgtaatgcggagcttgttgcattcggaaataaacaaacatgaacctcgccaggggggccaggatagacaggctaataaagtcatggtgttagtagcctaatagaaggaattggaatatttaaataatgtatctaaacgcaaactccgagctggaaaaatgttaccggcgatgcgcggacaatttagaggcggcgatcaagaaacacctgctgggcgagcagtctggagcacagtcttcgatgggcccgagatccgataaccgtgctgggtaccgggacgtgaggcagcgcgacatccatcaaatataccaggcgccaaccgagtctctcggaaaacagcttctggatatcttccgctggcggcgcaacgacgaataatagtccctggaggtgacggaatatatatgtgtggagggtaaatctgacagggtgtagcaaaggtaatattttcctaaaacatgcaatcggctgccccgcaacgggaaaaagaatgactttggcactcttcaccagagtggggtgtcccgctcgtgtgtgcaaataggctcccactggtcaccccggattttgcagaaaaacagcaagttccggggtgtctcactggtgtccgccaataagaggagccggcaggcacggagtctacatcaagctgtctccgatacactcgactaccatccgggtctctcagagaggggaatggcactataaataccgcctccttgcgctctctgccttcatcaatcaaatcatgtacaggaacttaataattgctactgcccttacttgcggtgcatacagtgcctacgtgccttccgaaccatggagcacactgacacctgatgctagccttgaaagtgccctcaaagattactcacaaacttttggaatagctattaagtccttagatgccgacaagattaagagagacgtcaaatctggtgttgctgttggaggtttagcaggctaccctggtcccgcagggcccccaggtccgccgggtccgcccggaacatcaggtcatcccggaagccctggttcaccaggttatcagggaccgcccggagagcctggacaagctggtccctccggaccccctggtccaccaggtgctattggaccaagtggtcctgccggaaaagacggtgaatccggtagacctggtagacccggcgaaaggggtttaccaggtcctcccggaattaagggtccagccggtatacccggttttcctgggatgaagggtcacagaggatttgatggtagaaacggagagaaaggcgaaaccggtgctcccggactgaagggtgaaaacggtcttcctggtgagaacggcgctcctggacctatgggtccacgtggtgctccaggagaaagaggcagaccaggattgcctggtgcagctggtgctagaggtaacgatggtgcccgtggttccgatggacaacccgggccacccggccctccaggtgctattggtccatctgggcctgctgggaaggatggtgaatcgggtcggcctggtcggcctggtgaacgtggccttccgggtcctcccggtattaaaggaccggctggtattcccggttttcctggtatgaaaggtcatagaggttttgatggtagaaatggcgaaaagggtgaaactggtgctcctggattgaaaggtgagaatggtctgcctggggagaatggagcgcctggtccaatgggtccaagaggtgctcctggtgaaagaggtagaccgggacttcccggggcagctggcgctcgaggtaatgatggtgctagagggtctgatggtcaaccgggtccacccggtccgccaggtgcaataggtcctagcggaccggcaggcaaagacggggaatcaggtagaccaggaaggcccggggagagagggctacctggcccccccgggattaagggacctgcaggaatccctggcttcccaggcatgaagggtcataggggctttgatggaagaaacggagaaaagggtgaaacgggcgcgcctggccttaaaggggaaaacgggctgcctggggagaacggagctccgggccccatggggccgagaggcgccccaggtgaaagaggcagaccgggattgccaggggctgctggcgcacgtggtaacgacggggcaagagggagcgacggtcaacctggcccgccgggtccaccagcaattgctggtattggtggagaaaaggccggcggtttcgctccatattatggttaatcaagaggatgtcagaatgccatttgcctgagagatgcaggcttcatttttgatacttttttatttgtaacctatatagtataggattttttttgtcattttgtttcttctcgtacgagcttgctcctgatcagcctatctcgcagctgatgaatatcttgtggtaggggtttgggaaaatcattcgagtttgatgtttttcttggtatttcccactcctcttcagagtacagaagattaagtgagacgttcgtttgtgctccgga

SEQ ID NO: 1056 - DNA, 5298 bp, Artificial Sequence
  Plasmid
ggatccttcagtaatgtcttgtttcttttgttgcagtggtgagccattttgacttcgtgaaagtttctttagaatagttgtttccagaggccaaacattccacccgtagtaaagtgcaagcgtaggaagaccaagactggcataaatcaggtataagtgtcgagcactggcaggtgatcttctgaaagtttctactagcagataagatccagtagtcatgcatatggcaacaatgtaccgtgtggatctaagaacgcgtcctactaaccttcgcattcgttggtccagtttgttgttatcgatcaacgtgacaaggttgtcgattccgcgtaagcatgcatacccaaggacgcctgttgcaattccaagtgagccagttccaacaatctttgtaatattagagcacttcattgtgttgcgcttgaaagtaaaatgcgaacaaattaagagataatctcgaaaccgcgacttcaaacgccaatatgatgtgcggcacacaataagcgttcatatccgctgggtgactttctcgctttaaaaaattatccgaaaaaattttctagagtgttgttactttatacttccggctcgtataatacgacaaggtgtaaggaggactaaaccatggctaaactcacctctgctgttccagtcctgactgctcgtgatgttgctggtgctgttgagttctggactgataggctcggtttctcccgtgacttcgtagaggacgactttgccggtgttgtacgtgacgacgttaccctgttcatctccgcagttcaggaccaggttgtgccagacaacactctggcatgggtatgggttcgtggtctggacgaactgtacgctgagtggtctgaggtcgtgtctaccaacttccgtgatgcatctggtccagctatgaccgagatcggtgaacagccctggggtcgtgagtttgcactgcgtgatccagctggtaactgcgtgcatttcgtcgcagaagagcaggactaacaattgacaccttacgattatttagagagtatttattagttttattgtatgtatacggatgttttattatctatttatgcccttatattctgtaactatccaaaagtcctatcttatcaagccagcaatctatgtccgcgaacgtcaactaaaaataagctttttatgctcttctctctttttttcccttcggtataattataccttgcatccacagattctcctgccaaattttgcataatcctttacaacatggctatatgggagcacttagcgccctccaaaacccatattgcctacgcatgtataggtgttttttccacaatattttctctgtgctctctttttattaaagagaagctctatatcggagaagcttctgtggccgttatattcggccttatcgtgggaccacattgcctgaattggtttgccccggaagattggggaaacttggatctgattaccttagctgcagaaaagggtaccactgagcgtcagaccccgtagaaaagatcaaaggatcttcttgagatcctttttttctgcgcgtaatctgctgcttgcaaacaaaaaaaccaccgctaccagcggtggtttgtttgccggatcaagagctaccaactctttttccgaaggtaactggcttcagcagagcgcagataccaaatactgttcttctagtgtagccgtagttaggccaccacttcaagaactctgtagcaccgcctacatacctcgctctgctaatcctgttaccagtggctgctgccagtggcgataagtcgtgtcttaccgggttggacccaagacgatagttaccggataaggcgcagcggtcgggctgaacggggggttcgtgcacacagcccagcttggagcgaacgacctacaccgaactgagatacctacagcgtgagctatgagaaagcgccacgcttcccgaagggagaaaggcggacaggtatccggtaagcggcagggtcggaacaggagagcgcacgagggagcttccagggggaaacgcctggtatctttatagtcctgtcgggtttcgccacctctgacttgagcgtcgatttttgtgatgctcgtcaggggggcggagcctatggaaaaacgccagcaacgcggcctttttacggttcctggccttttgctggccttttgctcacatgtatttcagaagcgatagagagactgcgctaagcattaatgagattatttttgagcattcgtcaatcaataccaaacaagacaaacggtatgccgacttttggaagtttctttttgaccaactggccgttagcatttcaacgaaccaaacttagttcatcttggatgagatcacgcttttgtcatattaggttccaagacagcgtttaaactgtcagttttgggccatttggggaacatgaaactatttgaccccacactcagaaagccctcatctggagtgatgttcgggtgtaatgcggagcttgttgcattcggaaataaacaaacatgaacctcgccaggggggccaggatagacaggctaataaagtcatggtgttagtagcctaatagaaggaattggaatatttaaataatgtatctaaacgcaaactccgagctggaaaaatgttaccggcgatgcgcggacaatttagaggcggcgatcaagaaacacctgctgggcgagcagtctggagcacagtcttcgatgggcccgagatccgataaccgtgctgggtaccgggacgtgaggcagcgcgacatccatcaaatataccaggcgccaaccgagtctctcggaaaacagcttctggatatcttccgctggcggcgcaacgacgaataatagtccctggaggtgacggaatatatatgtgtggagggtaaatctgacagggtgtagcaaaggtaatattttcctaaaacatgcaatcggctgccccgcaacgggaaaaagaatgactttggcactcttcaccagagtggggtgtcccgctcgtgtgtgcaaataggctcccactggtcaccccggattttgcagaaaaacagcaagttccggggtgtctcactggtgtccgccaataagaggagccggcaggcacggagtctacatcaagctgtctccgatacactcgactaccatccgggtctctcagagaggggaatggcactataaataccgcctccttgcgctctctgccttcatcaatcaaatcatgtacaggaacttaataattgctactgcccttacttgcggtgcatacagtgcctacgtgccttccgaaccatggagcacactgacacctgatgctagccttgaaagtgccctcaaagattactcacaaacttttggaatagctattaagtccttagatgccgacaagattaagagagacgtcaaatctggtgttgctgttggaggtttagcaggctaccctggtcccgcagggcccccaggtccgccgggtccgcccggaacatcaggtcatcccggaagccctggttcaccaggttatcagggaccgcccggagagcctggacaagctggtccctccggaccccctggtccaccaggtgctattggaccaagtggtcctgccggaaaagacggtgaatccggtagacctggtagacccggcgaaaggggtttaccaggtcctcccggaattaagggtccagccggtatacccggttttcctgggatgaagggtcacagaggatttgatggtagaaacggagagaaaggcgaaaccggtgctcccggactgaagggtgaaaacggtcttcctggtgagaacggcgctcctggacctatgggtccacgtggtgctccaggagaaagaggcagaccaggattgcctggtgcagctggtgctagaggtaacgatggtgcccgtggttccgatggacaacccgggccacccggccctccaggtaccgctggatttcctggaagccctggtgctaagggggaggttggtccggctggtagtcccggaagtaacggtgccccaggtcaaagaggcgaaccaggccctcagggtcacgcaggagcacagggaccgcctggtcctcctggtattaatggttcgcctggaggaaaaggtgaaatggggcccgcaggaatccccggtgcgcctggtcttatgggtgccaggggtcctccaggcccggccggtgcaaatggtgctcccggattacgaggaggagctggtgaacctggtaaaaacggtgccaaaggagaaccaggtcctcgtggagagcgtggtgaagctggcattcccggtgtgcctggtgcaaaaggtgaggacggtaaggacggttcccctggtgagccaggtgcgaacggactgccaggtgcagccggagagcgaggagctccaggattcaggggaccagccggtcctaacggcattcctggtgaaaaagggcccgccggtgaaaggggagctcccggtccagcaggccctcgtggagcagctggtgagcctggacgtgacggtgtcccaggagggccaggtatgaggggtatgcccgggtcccctggcggtcctggatcggatggaaaaccagggccaccaggttcgcagggtgaaagcggacgtccaggcccacccggcccttcaggtccaaggggtcagcctggtgtcatgggtttccccggtccaaagggtcaccgtggatttccgggtaaaaatggtgaacgtggtggcccaggtggtccaggaccccaaggtccaccaggaaaaaacggtgagacaggtcctcaaggacctccaggacctaccggtcctggaggagataagggagatacgggaccgccaggacctcaaggattgcaaggtttgcctggtacaggaggccctcccggagaaaatggtaagcctggagagccaggaccaaaaggcgatgctggagccccaggtgcacccggaggtaagggagacgccggtgctccgggtgagcgtggtcctccggcaattgctggtattggtggagaaaaggccggcggtttcgctccatattatggttaatcaagaggatgtcagaatgccatttgcctgagagatgcaggcttcatttttgatacttttttatttgtaacctatatagtataggattttttttgtcattttgtttcttctcgtacgagcttgctcctgatcagcctatctcgcagctgatgaatatcttgtggtaggggtttgggaaaatcattcgagtttgatgtttttcttggtatttcccactcctcttcagagtacagaagattaagtgagacgttcgtttgtgctccgga

SEQ ID NO: 1057 - DNA, 5300 bp, Artificial Sequence
  Plasmid
ggatccttcagtaatgtcttgtttcttttgttgcagtggtgagccattttgacttcgtgaaagtttctttagaatagttgtttccagaggccaaacattccacccgtagtaaagtgcaagcgtaggaagaccaagactggcataaatcaggtataagtgtcgagcactggcaggtgatcttctgaaagtttctactagcagataagatccagtagtcatgcatatggcaacaatgtaccgtgtggatctaagaacgcgtcctactaaccttcgcattcgttggtccagtttgttgttatcgatcaacgtgacaaggttgtcgattccgcgtaagcatgcatacccaaggacgcctgttgcaattccaagtgagccagttccaacaatctttgtaatattagagcacttcattgtgttgcgcttgaaagtaaaatgcgaacaaattaagagataatctcgaaaccgcgacttcaaacgccaatatgatgtgcggcacacaataagcgttcatatccgctgggtgactttctcgctttaaaaaattatccgaaaaaattttctagagtgttgttactttatacttccggctcgtataatacgacaaggtgtaaggaggactaaaccatggctaaactcacctctgctgttccagtcctgactgctcgtgatgttgctggtgctgttgagttctggactgataggctcggtttctcccgtgacttcgtagaggacgactttgccggtgttgtacgtgacgacgttaccctgttcatctccgcagttcaggaccaggttgtgccagacaacactctggcatgggtatgggttcgtggtctggacgaactgtacgctgagtggtctgaggtcgtgtctaccaacttccgtgatgcatctggtccagctatgaccgagatcggtgaacagccctggggtcgtgagtttgcactgcgtgatccagctggtaactgcgtgcatttcgtcgcagaagagcaggactaacaattgacaccttacgattatttagagagtatttattagttttattgtatgtatacggatgttttattatctatttatgcccttatattctgtaactatccaaaagtcctatcttatcaagccagcaatctatgtccgcgaacgtcaactaaaaataagctttttatgctcttctctctttttttcccttcggtataattataccttgcatccacagattctcctgccaaattttgcataatcctttacaacatggctatatgggagcacttagcgccctccaaaacccatattgcctacgcatgtataggtgttttttccacaatattttctctgtgctctctttttattaaagagaagctctatatcggagaagcttctgtggccgttatattcggccttatcgtgggaccacattgcctgaattggtttgccccggaagattggggaaacttggatctgattaccttagctgcagaaaagggtaccactgagcgtcagaccccgtagaaaagatcaaaggatcttcttgagatcctttttttctgcgcgtaatctgctgcttgcaaacaaaaaaaccaccgctaccagcggtggtttgtttgccggatcaagagctaccaactctttttccgaaggtaactggcttcagcagagcgcagataccaaatactgttcttctagtgtagccgtagttaggccaccacttcaagaactctgtagcaccgcctacatacctcgctctgctaatcctgttaccagtggctgctgccagtggcgataagtcgtgtcttaccgggttggacccaagacgatagttaccggataaggcgcagcggtcgggctgaacggggggttcgtgcacacagcccagcttggagcgaacgacctacaccgaactgagatacctacagcgtgagctatgagaaagcgccacgcttcccgaagggagaaaggcggacaggtatccggtaagcggcagggtcggaacaggagagcgcacgagggagcttccagggggaaacgcctggtatctttatagtcctgtcgggtttcgccacctctgacttgagcgtcgatttttgtgatgctcgtcaggggggcggagcctatggaaaaacgccagcaacgcggcctttttacggttcctggccttttgctggccttttgctcacatgtatttcagaagcgatagagagactgcgctaagcattaatgagattatttttgagcattcgtcaatcaataccaaacaagacaaacggtatgccgacttttggaagtttctttttgaccaactggccgttagcatttcaacgaaccaaacttagttcatcttggatgagatcacgcttttgtcatattaggttccaagacagcgtttaaactgtcagttttgggccatttggggaacatgaaactatttgaccccacactcagaaagccctcatctggagtgatgttcgggtgtaatgcggagcttgttgcattcggaaataaacaaacatgaacctcgccaggggggccaggatagacaggctaataaagtcatggtgttagtagcctaatagaaggaattggaatatttaaataatgtatctaaacgcaaactccgagctggaaaaatgttaccggcgatgcgcggacaatttagaggcggcgatcaagaaacacctgctgggcgagcagtctggagcacagtcttcgatgggcccgagatccgataaccgtgctgggtaccgggacgtgaggcagcgcgacatccatcaaatataccaggcgccaaccgagtctctcggaaaacagcttctggatatcttccgctggcggcgcaacgacgaataatagtccctggaggtgacggaatatatatgtgtggagggtaaatctgacagggtgtagcaaaggtaatattttcctaaaacatgcaatcggctgccccgcaacgggaaaaagaatgactttggcactcttcaccagagtggggtgtcccgctcgtgtgtgcaaataggctcccactggtcaccccggattttgcagaaaaacagcaagttccggggtgtctcactggtgtccgccaataagaggagccggcaggcacggagtctacatcaagctgtctccgatacactcgactaccatccgggtctctcagagaggggaatggcactataaataccgcctccttgcgctctctgccttcatcaatcaaatcatgtacaggaacttaataattgctactgcccttacttgcggtgcatacagtgcctacgtgccttccgaaccatggagcacactgacacctgatgctagccttgaaagtgccctcaaagattactcacaaacttttggaatagctattaagtccttagatgccgacaagattaagagagacgtcaaatctggtgttgctgttggaggtttagcaggctaccctggtcccgcagggcccccaggtccgccgggtccgcccggaacatcaggtcatcccggaagccctggttcaccaggttatcagggaccgcccggagagcctggacaagctggtccctccggaccccctggtccaccaggtgctattggaccaagtggtcctgccggaaaagacggtgaatccggtagacctggtagacccggcgccgctggtttaccaggtcctcccggaattaagggtccagccggtatacccggttttcctgggatgaagggtcacagaggatttgatggtagaaacggagagaaaggcgaaaccggtgctcccggactgaagggtgaaaacggtcttcctggtgccgctggcgctcctggacctatgggtccacgtggtgctccaggagccgctggcagaccaggattgcctggtgcagctggtgctagaggtaacgatggtgcccgtggttccgatggacaacccgggccacccggccctccaggtaccgctggatttcctggaagccctggtgctaagggggaggttggtccggctggtagtcccggaagtaacggtgccccaggtcaaagaggcgaaccaggccctcagggtcacgcaggagcacagggaccgcctggtcctcctggtattaatggttcgcctggaggaaaaggtgaaatggggcccgcaggaatccccggtgcgcctggtcttatgggtgccaggggtcctccaggcccggccggtgcaaatggtgctcccggattacgaggaggagctggtgaacctggtaaaaacggtgccaaaggagaaccaggtcctcgtggagagcgtggtgaagctggcattcccggtgtgcctggtgcaaaaggtgaggacggtaaggacggttcccctggtgagccaggtgcgaacggactgccaggtgcagccggagagcgaggagctccaggattcaggggaccagccggtcctaacggcattcctggtgaaaaagggcccgccggtgaaaggggagctcccggtccagcaggccctcgtggagcagctggtgagcctggacgtgacggtgtcccaggagggccaggtatgaggggtatgcccgggtcccctggcggtcctggatcggatggaaaaccagggccaccaggttcgcagggtgaaagcggacgtccaggcccacccggcccttcaggtccaaggggtcagcctggtgtcatgggtttccccggtccaaagggtaatgacggagcaccgggtaaaaatggtgaacgtggtggcccaggtggtccaggaccccaaggtccaccaggaaaaaacggtgagacaggtcctcaaggacctccaggacctaccggtcctggaggagataagggagatacgggaccgccaggacctcaaggattgcaaggtttgcctggtacaggaggccctcccggagaaaatggtaagcctggagagccaggaccaaaaggcgatgctggagccccaggtgcacccggaggtaagggagacgccggtgctccgggtgccgctggtcctccgaagcaattgctggtattggtggagaaaaggccggcggtttcgctccatattatggttaatcaagaggatgtcagaatgccatttgcctgagagatgcaggcttcatttttgatacttttttatttgtaacctatatagtataggattttttttgtcattttgtttcttctcgtacgagcttgctcctgatcagcctatctcgcagctgatgaatatcttgtggtaggggtttgggaaaatcattcgagtttgatgtttttcttggtatttcccactcctcttcagagtacagaagattaagtgagacgttcgtttgtgctccgga

SEQ ID NO: 1058 - DNA, 5298 bp, Artificial Sequence
  Plasmid
ggatccttcagtaatgtcttgtttcttttgttgcagtggtgagccattttgacttcgtgaaagtttctttagaatagttgtttccagaggccaaacattccacccgtagtaaagtgcaagcgtaggaagaccaagactggcataaatcaggtataagtgtcgagcactggcaggtgatcttctgaaagtttctactagcagataagatccagtagtcatgcatatggcaacaatgtaccgtgtggatctaagaacgcgtcctactaaccttcgcattcgttggtccagtttgttgttatcgatcaacgtgacaaggttgtcgattccgcgtaagcatgcatacccaaggacgcctgttgcaattccaagtgagccagttccaacaatctttgtaatattagagcacttcattgtgttgcgcttgaaagtaaaatgcgaacaaattaagagataatctcgaaaccgcgacttcaaacgccaatatgatgtgcggcacacaataagcgttcatatccgctgggtgactttctcgctttaaaaaattatccgaaaaaattttctagagtgttgttactttatacttccggctcgtataatacgacaaggtgtaaggaggactaaaccatggctaaactcacctctgctgttccagtcctgactgctcgtgatgttgctggtgctgttgagttctggactgataggctcggtttctcccgtgacttcgtagaggacgactttgccggtgttgtacgtgacgacgttaccctgttcatctccgcagttcaggaccaggttgtgccagacaacactctggcatgggtatgggttcgtggtctggacgaactgtacgctgagtggtctgaggtcgtgtctaccaacttccgtgatgcatctggtccagctatgaccgagatcggtgaacagccctggggtcgtgagtttgcactgcgtgatccagctggtaactgcgtgcatttcgtcgcagaagagcaggactaacaattgacaccttacgattatttagagagtatttattagttttattgtatgtatacggatgttttattatctatttatgcccttatattctgtaactatccaaaagtcctatcttatcaagccagcaatctatgtccgcgaacgtcaactaaaaataagctttttatgctcttctctctttttttcccttcggtataattataccttgcatccacagattctcctgccaaattttgcataatcctttacaacatggctatatgggagcacttagcgccctccaaaacccatattgcctacgcatgtataggtgttttttccacaatattttctctgtgctctctttttattaaagagaagctctatatcggagaagcttctgtggccgttatattcggccttatcgtgggaccacattgcctgaattggtttgccccggaagattggggaaacttggatctgattaccttagctgcagaaaagggtaccactgagcgtcagaccccgtagaaaagatcaaaggatcttcttgagatcctttttttctgcgcgtaatctgctgcttgcaaacaaaaaaaccaccgctaccagcggtggtttgtttgccggatcaagagctaccaactctttttccgaaggtaactggcttcagcagagcgcagataccaaatactgttcttctagtgtagccgtagttaggccaccacttcaagaactctgtagcaccgcctacatacctcgctctgctaatcctgttaccagtggctgctgccagtggcgataagtcgtgtcttaccgggttggacccaagacgatagttaccggataaggcgcagcggtcgggctgaacggggggttcgtgcacacagcccagcttggagcgaacgacctacaccgaactgagatacctacagcgtgagctatgagaaagcgccacgcttcccgaagggagaaaggcggacaggtatccggtaagcggcagggtcggaacaggagagcgcacgagggagcttccagggggaaacgcctggtatctttatagtcctgtcgggtttcgccacctctgacttgagcgtcgatttttgtgatgctcgtcaggggggcggagcctatggaaaaacgccagcaacgcggcctttttacggttcctggccttttgctggccttttgctcacatgtatttcagaagcgatagagagactgcgctaagcattaatgagattatttttgagcattcgtcaatcaataccaaacaagacaaacggtatgccgacttttggaagtttctttttgaccaactggccgttagcatttcaacgaaccaaacttagttcatcttggatgagatcacgcttttgtcatattaggttccaagacagcgtttaaactgtcagttttgggccatttggggaacatgaaactatttgaccccacactcagaaagccctcatctggagtgatgttcgggtgtaatgcggagcttgttgcattcggaaataaacaaacatgaacctcgccaggggggccaggatagacaggctaataaagtcatggtgttagtagcctaatagaaggaattggaatatttaaataatgtatctaaacgcaaactccgagctggaaaaatgttaccggcgatgcgcggacaatttagaggcggcgatcaagaaacacctgctgggcgagcagtctggagcacagtcttcgatgggcccgagatccgataaccgtgctgggtaccgggacgtgaggcagcgcgacatccatcaaatataccaggcgccaaccgagtctctcggaaaacagcttctggatatcttccgctggcggcgcaacgacgaataatagtccctggaggtgacggaatatatatgtgtggagggtaaatctgacagggtgtagcaaaggtaatattttcctaaaacatgcaatcggctgccccgcaacgggaaaaagaatgactttggcactcttcaccagagtggggtgtcccgctcgtgtgtgcaaataggctcccactggtcaccccggattttgcagaaaaacagcaagttccggggtgtctcactggtgtccgccaataagaggagccggcaggcacggagtctacatcaagctgtctccgatacactcgactaccatccgggtctctcagagaggggaatggcactataaataccgcctccttgcgctctctgccttcatcaatcaaatcatgtacaggaacttaataattgctactgcccttacttgcggtgcatacagtgcctacgtgccttccgaaccatggagcacactgacacctgatgctagccttgaaagtgccctcaaagattactcacaaacttttggaatagctattaagtccttagatgccgacaagattaagagagacgtcaaatctggtgttgctgttggaggtttagcaggctaccctggtcccgcagggcccccaggtccgccgggtccgcccggaacatcaggtcatcccggaagccctggttcaccaggttatcagggaccgcccggagagcctggacaagctggtccctccggaccccctggtccaccaggtgctattggaccaagtggtcctgccggaaaagacggtgaatccggtaaacctggtagacccggcgaaaggggtttaccaggtcctcccggaattaagggtccagccggtatacccggttttcctgggatgaagggtcacagaggatttgatggtaaaaacggagagaaaggcgaaaccggtgctcccggactgaagggtgaaaacggtcttcctggtgagaacggcgctcctggacctatgggtccaaagggtgctccaggagaaagaggcaaaccaggattgcctggtgcagctggtgctaagggtaacgatggtgccaaaggttccgatggacaacccgggccacccggccctccaggtaccgctggatttcctggaagccctggtgctaagggggaggttggtccggctggtagtcccggaagtaacggtgccccaggtcaaaaaggcgaaccaggccctcagggtcacgcaggagcacagggaccgcctggtcctcctggtattaatggttcgcctggaggaaaaggtgaaatggggcccgcaggaatccccggtgcgcctggtcttatgggtgccaagggtcctccaggcccggccggtgcaaatggtgctcccggattaaaaggaggagctggtgaacctggtaaaaacggtgccaaaggagaaccaggtcctaaaggagagaagggtgaagctggcattcccggtgtgcctggtgcaaaaggtgaggacggtaaggacggttcccctggtgagccaggtgcgaacggactgccaggtgcagccggagagaaaggagctccaggattcaagggaccagccggtcctaacggcattcctggtgaaaaagggcccgccggtgaaaaaggagctcccggtccagcaggccctaagggagcagctggtgagcctggaaaagacggtgtcccaggagggccaggtatgaaaggtatgcccgggtcccctggcggtcctggatcggatggaaaaccagggccaccaggttcgcagggtgaaagcggaaaaccaggcccacccggcccttcaggtccaaaaggtcagcctggtgtcatgggtttccccggtccaaagggtaatgacggagcaccgggtaaaaatggtgaaaagggtggcccaggtggtccaggaccccaaggtccaccaggaaaaaacggtgagacaggtcctcaaggacctccaggacctaccggtcctggaggagataagggagatacgggaccgccaggacctcaaggattgcaaggtttgcctggtacaggaggccctcccggagaaaatggtaagcctggagagccaggaccaaaaggcgatgctggagccccaggtgcacccggaggtaagggagacgccggtgctccgggtgagcgtggtcctccggcaattgctggtattggtggagaaaaggccggcggtttcgctccatattatggttaatcaagaggatgtcagaatgccatttgcctgagagatgcaggcttcatttttgatacttttttatttgtaacctatatagtataggattttttttgtcattttgtttcttctcgtacgagcttgctcctgatcagcctatctcgcagctgatgaatatcttgtggtaggggtttgggaaaatcattcgagtttgatgtttttcttggtatttcccactcctcttcagagtacagaagattaagtgagacgttcgtttgtgctccgga

SEQ ID NO: 1059 - DNA, 5298 bp, Artificial Sequence
  Plasmid
ggatccttcagtaatgtcttgtttcttttgttgcagtggtgagccattttgacttcgtgaaagtttctttagaatagttgtttccagaggccaaacattccacccgtagtaaagtgcaagcgtaggaagaccaagactggcataaatcaggtataagtgtcgagcactggcaggtgatcttctgaaagtttctactagcagataagatccagtagtcatgcatatggcaacaatgtaccgtgtggatctaagaacgcgtcctactaaccttcgcattcgttggtccagtttgttgttatcgatcaacgtgacaaggttgtcgattccgcgtaagcatgcatacccaaggacgcctgttgcaattccaagtgagccagttccaacaatctttgtaatattagagcacttcattgtgttgcgcttgaaagtaaaatgcgaacaaattaagagataatctcgaaaccgcgacttcaaacgccaatatgatgtgcggcacacaataagcgttcatatccgctgggtgactttctcgctttaaaaaattatccgaaaaaattttctagagtgttgttactttatacttccggctcgtataatacgacaaggtgtaaggaggactaaaccatggctaaactcacctctgctgttccagtcctgactgctcgtgatgttgctggtgctgttgagttctggactgataggctcggtttctcccgtgacttcgtagaggacgactttgccggtgttgtacgtgacgacgttaccctgttcatctccgcagttcaggaccaggttgtgccagacaacactctggcatgggtatgggttcgtggtctggacgaactgtacgctgagtggtctgaggtcgtgtctaccaacttccgtgatgcatctggtccagctatgaccgagatcggtgaacagccctggggtcgtgagtttgcactgcgtgatccagctggtaactgcgtgcatttcgtcgcagaagagcaggactaacaattgacaccttacgattatttagagagtatttattagttttattgtatgtatacggatgttttattatctatttatgcccttatattctgtaactatccaaaagtcctatcttatcaagccagcaatctatgtccgcgaacgtcaactaaaaataagctttttatgctcttctctctttttttcccttcggtataattataccttgcatccacagattctcctgccaaattttgcataatcctttacaacatggctatatgggagcacttagcgccctccaaaacccatattgcctacgcatgtataggtgttttttccacaatattttctctgtgctctctttttattaaagagaagctctatatcggagaagcttctgtggccgttatattcggccttatcgtgggaccacattgcctgaattggtttgccccggaagattggggaaacttggatctgattaccttagctgcagaaaagggtaccactgagcgtcagaccccgtagaaaagatcaaaggatcttcttgagatcctttttttctgcgcgtaatctgctgcttgcaaacaaaaaaaccaccgctaccagcggtggtttgtttgccggatcaagagctaccaactctttttccgaaggtaactggcttcagcagagcgcagataccaaatactgttcttctagtgtagccgtagttaggccaccacttcaagaactctgtagcaccgcctacatacctcgctctgctaatcctgttaccagtggctgctgccagtggcgataagtcgtgtcttaccgggttggacccaagacgatagttaccggataaggcgcagcggtcgggctgaacggggggttcgtgcacacagcccagcttggagcgaacgacctacaccgaactgagatacctacagcgtgagctatgagaaagcgccacgcttcccgaagggagaaaggcggacaggtatccggtaagcggcagggtcggaacaggagagcgcacgagggagcttccagggggaaacgcctggtatctttatagtcctgtcgggtttcgccacctctgacttgagcgtcgatttttgtgatgctcgtcaggggggcggagcctatggaaaaacgccagcaacgcggcctttttacggttcctggccttttgctggccttttgctcacatgtatttcagaagcgatagagagactgcgctaagcattaatgagattatttttgagcattcgtcaatcaataccaaacaagacaaacggtatgccgacttttggaagtttctttttgaccaactggccgttagcatttcaacgaaccaaacttagttcatcttggatgagatcacgcttttgtcatattaggttccaagacagcgtttaaactgtcagttttgggccatttggggaacatgaaactatttgaccccacactcagaaagccctcatctggagtgatgttcgggtgtaatgcggagcttgttgcattcggaaataaacaaacatgaacctcgccaggggggccaggatagacaggctaataaagtcatggtgttagtagcctaatagaaggaattggaatatttaaataatgtatctaaacgcaaactccgagctggaaaaatgttaccggcgatgcgcggacaatttagaggcggcgatcaagaaacacctgctgggcgagcagtctggagcacagtcttcgatgggcccgagatccgataaccgtgctgggtaccgggacgtgaggcagcgcgacatccatcaaatataccaggcgccaaccgagtctctcggaaaacagcttctggatatcttccgctggcggcgcaacgacgaataatagtccctggaggtgacggaatatatatgtgtggagggtaaatctgacagggtgtagcaaaggtaatattttcctaaaacatgcaatcggctgccccgcaacgggaaaaagaatgactttggcactcttcaccagagtggggtgtcccgctcgtgtgtgcaaataggctcccactggtcaccccggattttgcagaaaaacagcaagttccggggtgtctcactggtgtccgccaataagaggagccggcaggcacggagtctacatcaagctgtctccgatacactcgactaccatccgggtctctcagagaggggaatggcactataaataccgcctccttgcgctctctgccttcatcaatcaaatcatgtacaggaacttaataattgctactgcccttacttgcggtgcatacagtgcctacgtgccttccgaaccatggagcacactgacacctgatgctagccttgaaagtgccctcaaagattactcacaaacttttggaatagctattaagtccttagatgccgacaagattaagagagatgtcaagtcaggtgtggccgtgggtggcctagccggctacccaggcccagctggtccacccggcccacctggcccccccggtacctcaggacatcctggctcccctggttctccaggttaccaaggcccacccggtgagcctggccaggcaggcccttccggccctccaggaccccctggagccattggaccttcaggtccagctggaaaagatggcgagtcaggaagacccggccgtccaggagaacgtggcctacccggtccccccggtatcaagggccccgcaggtattcccggttttcctggaatgaagggacaccgtggatttgatggtaggaacggtgaaaagggcgagacaggtgcaccaggtcttaagggcgagaacggtttgcccggtgagaacggcgctccaggtcctatgggtccccgtggagctcctggcgagcgtggaagacctggtttgcctggtgctgccggtgccaggggaaatgatggagcacgtggttctgatggccagcctggaccccccggaccccctggaactgcaggattccccggagctgtgggcgcaaaaggcgaggcaggtccccaaggtcccagaggtagtgagggacctcagggtgtcagaggagagcctggtcctcctggccccgcaggagctgcaggcccagccggaccacccggagccgatggccaacccggtgccaagggtgctatgggtgctcccggtatcgctggtgcccctggttttccaggtgcacgtggaccacccggaccccaaggcgccggtggtccccctggacccaagggtggcgccggtgaacccggcgcccctggagctaaaggagatactggcgccaagggagagagaggccccgtcggagtgcagggcccacccggacccgccggtgaagagggaaagaggggagccaggggtgaacccggcccaactggcttaccaggtccaccaggtgaaaggggtggacctggttttcgtggcttccctggtgccgatggaatcccaggagagaagggacccgcaggagagcgtggcgcacccggacctgcaggtccaaggggcgccgccggagaaccaggtagagatggtgtccccggcggacccggtatgagaggcatgcccggttcccccggcggacctggctcagatggcaagccaggtccccccggcagtcaaggtgaatcaggaagacctggacccccaggccctagtggacctcgtggtcagccaggagtgatgggctttcctggtcctaagggaaatgacggcgctcccggcaaaaatggtgagagaggaggacccggaggcccaggaccacagggcccaccaggcaagaacggagaaacaggtcctcagggccccccaggacccactggtcccggaggcgataaaggcgatactggtcctcctggtcctcaaggcctacaaggattgccaggaactggaggccccccaggagagaacggaaaacccggtgaaccaggtcccaagggagacgcaggtgctccaggtgcacccggtggtaagggagacgcaggcgcacctggtgagagaggacctcctgcaatagccggcattggaggtgagaaagccggtggttttgctccatactatggttaatcaagaggatgtcagaatgccatttgcctgagagatgcaggcttcatttttgatacttttttatttgtaacctatatagtataggattttttttgtcattttgtttcttctcgtacgagcttgctcctgatcagcctatctcgcagctgatgaatatcttgtggtaggggtttgggaaaatcattcgagtttgatgtttttcttggtatttcccactcctcttcagagtacagaagattaagtgagacgttcgtttgtgctccgga

SEQ ID NO: 1060 - DNA, 5298 bp, Artificial Sequence
  Plasmid
ggatccttcagtaatgtcttgtttcttttgttgcagtggtgagccattttgacttcgtgaaagtttctttagaatagttgtttccagaggccaaacattccacccgtagtaaagtgcaagcgtaggaagaccaagactggcataaatcaggtataagtgtcgagcactggcaggtgatcttctgaaagtttctactagcagataagatccagtagtcatgcatatggcaacaatgtaccgtgtggatctaagaacgcgtcctactaaccttcgcattcgttggtccagtttgttgttatcgatcaacgtgacaaggttgtcgattccgcgtaagcatgcatacccaaggacgcctgttgcaattccaagtgagccagttccaacaatctttgtaatattagagcacttcattgtgttgcgcttgaaagtaaaatgcgaacaaattaagagataatctcgaaaccgcgacttcaaacgccaatatgatgtgcggcacacaataagcgttcatatccgctgggtgactttctcgctttaaaaaattatccgaaaaaattttctagagtgttgttactttatacttccggctcgtataatacgacaaggtgtaaggaggactaaaccatggctaaactcacctctgctgttccagtcctgactgctcgtgatgttgctggtgctgttgagttctggactgataggctcggtttctcccgtgacttcgtagaggacgactttgccggtgttgtacgtgacgacgttaccctgttcatctccgcagttcaggaccaggttgtgccagacaacactctggcatgggtatgggttcgtggtctggacgaactgtacgctgagtggtctgaggtcgtgtctaccaacttccgtgatgcatctggtccagctatgaccgagatcggtgaacagccctggggtcgtgagtttgcactgcgtgatccagctggtaactgcgtgcatttcgtcgcagaagagcaggactaacaattgacaccttacgattatttagagagtatttattagttttattgtatgtatacggatgttttattatctatttatgcccttatattctgtaactatccaaaagtcctatcttatcaagccagcaatctatgtccgcgaacgtcaactaaaaataagctttttatgctcttctctctttttttcccttcggtataattataccttgcatccacagattctcctgccaaattttgcataatcctttacaacatggctatatgggagcacttagcgccctccaaaacccatattgcctacgcatgtataggtgttttttccacaatattttctctgtgctctctttttattaaagagaagctctatatcggagaagcttctgtggccgttatattcggccttatcgtgggaccacattgcctgaattggtttgccccggaagattggggaaacttggatctgattaccttagctgcagaaaagggtaccactgagcgtcagaccccgtagaaaagatcaaaggatcttcttgagatcctttttttctgcgcgtaatctgctgcttgcaaacaaaaaaaccaccgctaccagcggtggtttgtttgccggatcaagagctaccaactctttttccgaaggtaactggcttcagcagagcgcagataccaaatactgttcttctagtgtagccgtagttaggccaccacttcaagaactctgtagcaccgcctacatacctcgctctgctaatcctgttaccagtggctgctgccagtggcgataagtcgtgtcttaccgggttggacccaagacgatagttaccggataaggcgcagcggtcgggctgaacggggggttcgtgcacacagcccagcttggagcgaacgacctacaccgaactgagatacctacagcgtgagctatgagaaagcgccacgcttcccgaagggagaaaggcggacaggtatccggtaagcggcagggtcggaacaggagagcgcacgagggagcttccagggggaaacgcctggtatctttatagtcctgtcgggtttcgccacctctgacttgagcgtcgatttttgtgatgctcgtcaggggggcggagcctatggaaaaacgccagcaacgcggcctttttacggttcctggccttttgctggccttttgctcacatgtatttcagaagcgatagagagactgcgctaagcattaatgagattatttttgagcattcgtcaatcaataccaaacaagacaaacggtatgccgacttttggaagtttctttttgaccaactggccgttagcatttcaacgaaccaaacttagttcatcttggatgagatcacgcttttgtcatattaggttccaagacagcgtttaaactgtcagttttgggccatttggggaacatgaaactatttgaccccacactcagaaagccctcatctggagtgatgttcgggtgtaatgcggagcttgttgcattcggaaataaacaaacatgaacctcgccaggggggccaggatagacaggctaataaagtcatggtgttagtagcctaatagaaggaattggaatatttaaataatgtatctaaacgcaaactccgagctggaaaaatgttaccggcgatgcgcggacaatttagaggcggcgatcaagaaacacctgctgggcgagcagtctggagcacagtcttcgatgggcccgagatccgataaccgtgctgggtaccgggacgtgaggcagcgcgacatccatcaaatataccaggcgccaaccgagtctctcggaaaacagcttctggatatcttccgctggcggcgcaacgacgaataatagtccctggaggtgacggaatatatatgtgtggagggtaaatctgacagggtgtagcaaaggtaatattttcctaaaacatgcaatcggctgccccgcaacgggaaaaagaatgactttggcactcttcaccagagtggggtgtcccgctcgtgtgtgcaaataggctcccactggtcaccccggattttgcagaaaaacagcaagttccggggtgtctcactggtgtccgccaataagaggagccggcaggcacggagtctacatcaagctgtctccgatacactcgactaccatccgggtctctcagagaggggaatggcactataaataccgcctccttgcgctctctgccttcatcaatcaaatcatgtacaggaacttaataattgctactgcccttacttgcggtgcatacagtgcctacgtgccttccgaaccatggagcacactgacacctgatgctagccttgaaagtgccctcaaagattactcacaaacttttggaatagctattaagtccttagatgccgacaagattaagagagacgtcaaatctggtgttgctgttggaggtattgcaggctaccctggtcccgcagggcccccaggtccgccgggtccgcccggaacatcaggtcatcccggaagccctggttcaccaggttatcagggaccgcccggagagcctggacaagctggtccctccggaccccctggtccaccaggtgctttaggaccaagtggtcctgccggaaaagacggtgaatccggtagacctggtagacccggcgaaaggggtgttccaggtcctcccggagttaagggtccagccggtttacccggttttcctgggatgaagggtcacagaggatttgatggtagaaacggagagaaaggcgaaaccggtgctcccggactgaagggtgaaaacggtcttcctggtgagaacggcgctcctggacctatgggtccacgtggtgctccaggagaaagaggcagaccaggattgcctggtgcagctggtgctagaggtaacgatggtgcccgtggttccgatggacaacccgggccacccggccctccaggtaccgctggatttcctggaagccctggtgctaagggggagttgggtccggctggtagtcccggaagtaacggtgccccaggtcaaagaggcgaaccaggccctcagggtcacgcaggagcacagggaccgcctggtcctcctggtttgaatggttcgcctggaggaaaaggtgaaatggggcccgcaggagttcccggtgcgcctggtattatgggtgccaggggtcctccaggcccggccggtgcaaatggtgctcccggaatacgaggaggagctggtgaacctggtaaaaacggtgccaaaggagaaccaggtcctcgtggagagcgtggtgaagctggcttacccggtttacctggtgcaaaaggtgaggacggtaaggacggttcccctggtgagccaggtgcgaacggagttccaggtgcagccggagagcgaggagctccaggattcaggggaccagccggtcctaacggcttgcctggtgaaaaagggcccgccggtgaaaggggagctcccggtccagcaggccctcgtggagcagctggtgagcctggacgtgacggtattccaggagggccaggtatgaggggtatgcccgggtcccctggcggtcctggatcggatggaaaaccagggccaccaggttcgcagggtgaaagcggacgtccaggcccacccggcccttcaggtccaaggggtcagcctggtttgatgggtttccccggtccaaagggtaatgacggagcaccgggtaaaaatggtgaacgtggtggcccaggtggtccaggaccccaaggtccaccaggaaaaaacggtgagacaggtcctcaaggacctccaggacctaccggtcctggaggagataagggagatacgggaccgccaggacctcaaggagttcaaggtttgcctggtacaggaggccctcccggagaaaatggtaagcctggagagccaggaccaaaaggcgatgctggagccccaggtgcacccggaggtaagggagacgccggtgctccgggtgagcgtggtcctccggcaattgctggtattggtggagaaaaggccggcggtttcgctccatattatggttaatcaagaggatgtcagaatgccatttgcctgagagatgcaggcttcatttttgatacttttttatttgtaacctatatagtataggattttttttgtcattttgtttcttctcgtacgagcttgctcctgatcagcctatctcgcagctgatgaatatcttgtggtaggggtttgggaaaatcattcgagtttgatgtttttcttggtatttcccactcctcttcagagtacagaagattaagtgagacgttcgtttgtgctccgga

SEQ ID NO: 1061 - DNA, 5298 bp, Artificial Sequence
  Plasmid
ggatccttcagtaatgtcttgtttcttttgttgcagtggtgagccattttgacttcgtgaaagtttctttagaatagttgtttccagaggccaaacattccacccgtagtaaagtgcaagcgtaggaagaccaagactggcataaatcaggtataagtgtcgagcactggcaggtgatcttctgaaagtttctactagcagataagatccagtagtcatgcatatggcaacaatgtaccgtgtggatctaagaacgcgtcctactaaccttcgcattcgttggtccagtttgttgttatcgatcaacgtgacaaggttgtcgattccgcgtaagcatgcatacccaaggacgcctgttgcaattccaagtgagccagttccaacaatctttgtaatattagagcacttcattgtgttgcgcttgaaagtaaaatgcgaacaaattaagagataatctcgaaaccgcgacttcaaacgccaatatgatgtgcggcacacaataagcgttcatatccgctgggtgactttctcgctttaaaaaattatccgaaaaaattttctagagtgttgttactttatacttccggctcgtataatacgacaaggtgtaaggaggactaaaccatggctaaactcacctctgctgttccagtcctgactgctcgtgatgttgctggtgctgttgagttctggactgataggctcggtttctcccgtgacttcgtagaggacgactttgccggtgttgtacgtgacgacgttaccctgttcatctccgcagttcaggaccaggttgtgccagacaacactctggcatgggtatgggttcgtggtctggacgaactgtacgctgagtggtctgaggtcgtgtctaccaacttccgtgatgcatctggtccagctatgaccgagatcggtgaacagccctggggtcgtgagtttgcactgcgtgatccagctggtaactgcgtgcatttcgtcgcagaagagcaggactaacaattgacaccttacgattatttagagagtatttattagttttattgtatgtatacggatgttttattatctatttatgcccttatattctgtaactatccaaaagtcctatcttatcaagccagcaatctatgtccgcgaacgtcaactaaaaataagctttttatgctcttctctctttttttcccttcggtataattataccttgcatccacagattctcctgccaaattttgcataatcctttacaacatggctatatgggagcacttagcgccctccaaaacccatattgcctacgcatgtataggtgttttttccacaatattttctctgtgctctctttttattaaagagaagctctatatcggagaagcttctgtggccgttatattcggccttatcgtgggaccacattgcctgaattggtttgccccggaagattggggaaacttggatctgattaccttagctgcagaaaagggtaccactgagcgtcagaccccgtagaaaagatcaaaggatcttcttgagatcctttttttctgcgcgtaatctgctgcttgcaaacaaaaaaaccaccgctaccagcggtggtttgtttgccggatcaagagctaccaactctttttccgaaggtaactggcttcagcagagcgcagataccaaatactgttcttctagtgtagccgtagttaggccaccacttcaagaactctgtagcaccgcctacatacctcgctctgctaatcctgttaccagtggctgctgccagtggcgataagtcgtgtcttaccgggttggacccaagacgatagttaccggataaggcgcagcggtcgggctgaacggggggttcgtgcacacagcccagcttggagcgaacgacctacaccgaactgagatacctacagcgtgagctatgagaaagcgccacgcttcccgaagggagaaaggcggacaggtatccggtaagcggcagggtcggaacaggagagcgcacgagggagcttccagggggaaacgcctggtatctttatagtcctgtcgggtttcgccacctctgacttgagcgtcgatttttgtgatgctcgtcaggggggcggagcctatggaaaaacgccagcaacgcggcctttttacggttcctggccttttgctggccttttgctcacatgtatttcagaagcgatagagagactgcgctaagcattaatgagattatttttgagcattcgtcaatcaataccaaacaagacaaacggtatgccgacttttggaagtttctttttgaccaactggccgttagcatttcaacgaaccaaacttagttcatcttggatgagatcacgcttttgtcatattaggttccaagacagcgtttaaactgtcagttttgggccatttggggaacatgaaactatttgaccccacactcagaaagccctcatctggagtgatgttcgggtgtaatgcggagcttgttgcattcggaaataaacaaacatgaacctcgccaggggggccaggatagacaggctaataaagtcatggtgttagtagcctaatagaaggaattggaatatttaaataatgtatctaaacgcaaactccgagctggaaaaatgttaccggcgatgcgcggacaatttagaggcggcgatcaagaaacacctgctgggcgagcagtctggagcacagtcttcgatgggcccgagatccgataaccgtgctgggtaccgggacgtgaggcagcgcgacatccatcaaatataccaggcgccaaccgagtctctcggaaaacagcttctggatatcttccgctggcggcgcaacgacgaataatagtccctggaggtgacggaatatatatgtgtggagggtaaatctgacagggtgtagcaaaggtaatattttcctaaaacatgcaatcggctgccccgcaacgggaaaaagaatgactttggcactcttcaccagagtggggtgtcccgctcgtgtgtgcaaataggctcccactggtcaccccggattttgcagaaaaacagcaagttccggggtgtctcactggtgtccgccaataagaggagccggcaggcacggagtctacatcaagctgtctccgatacactcgactaccatccgggtctctcagagaggggaatggcactataaataccgcctccttgcgctctctgccttcatcaatcaaatcatgtacaggaacttaataattgctactgcccttacttgcggtgcatacagtgcctacgtgccttccgaaccatggagcacactgacacctgatgctagccttgaaagtgccctcaaagattactcacaaacttttggaatagctattaagtccttagatgccgacaagattaagagagacgtcaaatctggtgttgctgttggaggtttagcaggctaccctggtcccgcagggcccccaggtccgccgggtccgcccggagcagcaggtcatcccggagcacctggtgcaccaggttatcagggaccgcccggagagcctggacaagctggtcccgctggaccccctggtccaccaggtgctattggaccagctggtcctgccggaaaagacggtgaagcaggtagacctggtagacccggcgaaaggggtttaccaggtcctcccggaattaagggtccagccggtatacccggttttcctgggatgaagggtcacagaggatttgatggtagagatggagagaaaggcgaagcaggtgctcccggactgaagggtgaagatggtcttcctggtgagaacggcgctcctggacctatgggtccacgtggtgctccaggagaaagaggcagaccaggattgcctggtgcagctggtgctagaggtgatgatggtgcccgtggtgctgatggacaacccgggccacccggccctccaggtgcagctggatttcctggagctcctggtgctaagggggaggttggtccggctggtgctcccggagcagatggtgccccaggtcaaagaggcgaaccaggccctcagggtcacgcaggagcacagggaccgcctggtcctcctggtattgatggtgctcctggaggaaaaggtgaaatggggcccgcaggaatccccggtgcgcctggtcttatgggtgccaggggtcctccaggcccggccggtgcagatggtgctcccggattacgaggaggagctggtgaacctggtaaagatggtgccaaaggagaaccaggtcctcgtggagagcgtggtgaagctggcattcccggtgtgcctggtgcaaaaggtgaggacggtaaggacggtgctcctggtgagccaggtgcggatggactgccaggtgcagccggagagcgaggagctccaggattcaggggaccagccggtcctgatggcattcctggtgaaaaagggcccgccggtgaaaggggagctcccggtccagcaggccctcgtggagcagctggtgagcctggacgtgacggtgtcccaggagggccaggtatgaggggtatgcccggggcccctggcggtcctggagctgatggaaaaccagggccaccaggtgctcagggtgaagctggacgtccaggcccacccggccctgctggtccaaggggtcagcctggtgtcatgggtttccccggtccaaagggtgatgacggagcaccgggtaaagatggtgaacgtggtggcccaggtggtccaggaccccaaggtccaccaggaaaagatggtgaggctggtcctcaaggacctccaggacctgctggtcctggaggagataagggagatgctggaccgccaggacctcaaggattgcaaggtttgcctggtgctggaggccctcccggagaagatggtaagcctggagagccaggaccaaaaggcgatgctggagccccaggtgcacccggaggtaagggagacgccggtgctccgggtgagcgtggtcctccggcaattgctggtattggtggagaaaaggccggcggtttcgctccatattatggttaatcaagaggatgtcagaatgccatttgcctgagagatgcaggcttcatttttgatacttttttatttgtaacctatatagtataggattttttttgtcattttgtttcttctcgtacgagcttgctcctgatcagcctatctcgcagctgatgaatatcttgtggtaggggtttgggaaaatcattcgagtttgatgtttttcttggtatttcccactcctcttcagagtacagaagattaagtgagacgttcgtttgtgctccgga

SEQ ID NO: 1062 - DNA, 5298 bp, Artificial Sequence
  Plasmid
ggatccttcagtaatgtcttgtttcttttgttgcagtggtgagccattttgacttcgtgaaagtttctttagaatagttgtttccagaggccaaacattccacccgtagtaaagtgcaagcgtaggaagaccaagactggcataaatcaggtataagtgtcgagcactggcaggtgatcttctgaaagtttctactagcagataagatccagtagtcatgcatatggcaacaatgtaccgtgtggatctaagaacgcgtcctactaaccttcgcattcgttggtccagtttgttgttatcgatcaacgtgacaaggttgtcgattccgcgtaagcatgcatacccaaggacgcctgttgcaattccaagtgagccagttccaacaatctttgtaatattagagcacttcattgtgttgcgcttgaaagtaaaatgcgaacaaattaagagataatctcgaaaccgcgacttcaaacgccaatatgatgtgcggcacacaataagcgttcatatccgctgggtgactttctcgctttaaaaaattatccgaaaaaattttctagagtgttgttactttatacttccggctcgtataatacgacaaggtgtaaggaggactaaaccatggctaaactcacctctgctgttccagtcctgactgctcgtgatgttgctggtgctgttgagttctggactgataggctcggtttctcccgtgacttcgtagaggacgactttgccggtgttgtacgtgacgacgttaccctgttcatctccgcagttcaggaccaggttgtgccagacaacactctggcatgggtatgggttcgtggtctggacgaactgtacgctgagtggtctgaggtcgtgtctaccaacttccgtgatgcatctggtccagctatgaccgagatcggtgaacagccctggggtcgtgagtttgcactgcgtgatccagctggtaactgcgtgcatttcgtcgcagaagagcaggactaacaattgacaccttacgattatttagagagtatttattagttttattgtatgtatacggatgttttattatctatttatgcccttatattctgtaactatccaaaagtcctatcttatcaagccagcaatctatgtccgcgaacgtcaactaaaaataagctttttatgctcttctctctttttttcccttcggtataattataccttgcatccacagattctcctgccaaattttgcataatcctttacaacatggctatatgggagcacttagcgccctccaaaacccatattgcctacgcatgtataggtgttttttccacaatattttctctgtgctctctttttattaaagagaagctctatatcggagaagcttctgtggccgttatattcggccttatcgtgggaccacattgcctgaattggtttgccccggaagattggggaaacttggatctgattaccttagctgcagaaaagggtaccactgagcgtcagaccccgtagaaaagatcaaaggatcttcttgagatcctttttttctgcgcgtaatctgctgcttgcaaacaaaaaaaccaccgctaccagcggtggtttgtttgccggatcaagagctaccaactctttttccgaaggtaactggcttcagcagagcgcagataccaaatactgttcttctagtgtagccgtagttaggccaccacttcaagaactctgtagcaccgcctacatacctcgctctgctaatcctgttaccagtggctgctgccagtggcgataagtcgtgtcttaccgggttggacccaagacgatagttaccggataaggcgcagcggtcgggctgaacggggggttcgtgcacacagcccagcttggagcgaacgacctacaccgaactgagatacctacagcgtgagctatgagaaagcgccacgcttcccgaagggagaaaggcggacaggtatccggtaagcggcagggtcggaacaggagagcgcacgagggagcttccagggggaaacgcctggtatctttatagtcctgtcgggtttcgccacctctgacttgagcgtcgatttttgtgatgctcgtcaggggggcggagcctatggaaaaacgccagcaacgcggcctttttacggttcctggccttttgctggccttttgctcacatgtatttcagaagcgatagagagactgcgctaagcattaatgagattatttttgagcattcgtcaatcaataccaaacaagacaaacggtatgccgacttttggaagtttctttttgaccaactggccgttagcatttcaacgaaccaaacttagttcatcttggatgagatcacgcttttgtcatattaggttccaagacagcgtttaaactgtcagttttgggccatttggggaacatgaaactatttgaccccacactcagaaagccctcatctggagtgatgttcgggtgtaatgcggagcttgttgcattcggaaataaacaaacatgaacctcgccaggggggccaggatagacaggctaataaagtcatggtgttagtagcctaatagaaggaattggaatatttaaataatgtatctaaacgcaaactccgagctggaaaaatgttaccggcgatgcgcggacaatttagaggcggcgatcaagaaacacctgctgggcgagcagtctggagcacagtcttcgatgggcccgagatccgataaccgtgctgggtaccgggacgtgaggcagcgcgacatccatcaaatataccaggcgccaaccgagtctctcggaaaacagcttctggatatcttccgctggcggcgcaacgacgaataatagtccctggaggtgacggaatatatatgtgtggagggtaaatctgacagggtgtagcaaaggtaatattttcctaaaacatgcaatcggctgccccgcaacgggaaaaagaatgactttggcactcttcaccagagtggggtgtcccgctcgtgtgtgcaaataggctcccactggtcaccccggattttgcagaaaaacagcaagttccggggtgtctcactggtgtccgccaataagaggagccggcaggcacggagtctacatcaagctgtctccgatacactcgactaccatccgggtctctcagagaggggaatggcactataaataccgcctccttgcgctctctgccttcatcaatcaaatcatgtacaggaacttaataattgctactgcccttacttgcggtgcatacagtgcctacgtgccttccgaaccatggagcacactgacacctgatgctagccttgaaagtgccctcaaagattactcacaaacttttggaatagctattaagtccttagatgccgacaagattaagagagacgtcaaatctggtgttgctgttggaggtttagcaggctaccctggtcccgcagggcccccaggtccgccgggtccgcccggaacatcaggtcatcccggaagccctggttcaccaggttatcagggaccgcccggagagcctggacaagctggtccctccggaccccctggtccaccaggtgctattggaccaagtggtcctgccggaaaagacggtgaatccggtagacctggtagacccggcgaaaggggtttaccaggtcctcccggaattaagggtccagccggtatacccggttttcctgggatgaagggtcacagaggatttgatggtagaaacggagagaaaggcgaaaccggtgctcccggactgaagggtgaaaacggtcttcctggtgagaacggcgctcctggacctatgggtccacgtggtgctccaggagaaagaggcagaccaggattgcctggtgcagctggtgctagaggtaacgatggtgcccgtggttccgatggacaacccgggccacccggccctccaggtaccgctggatttcctggaagccctggtgctaagggggaggttggtccggctggtagtcccggaagtaacggtgccccaggtcaaagaggcgaaccaggccctcagggtcacgcaggagcacagggaccgcctggtcctcctggtattaatggttcgcctggaggaaaaggtgaaatggggcccgcaggaatcgaaccaggaagacccgagggagagaaaggaggaggtcgtggtggtgctccaggcgctccaggaagaggagcaggcaacggtgagggagcccgtccaccccctttaatgggtggtgcaggcggtaacaaggctggaccactagctgccccaattcccggtgtgcctggtgcaaaaggtgaggacggtaaggacggttcccctggtgagccaggtgcgaacggactgccaggtgcagccggagagcgaggagctccaggattcaggggaccagccggtcctaacggcattcctggtgaaaaagggcccgccggtgaaaggggagctcccggtccagcaggccctcgtggagcagctggtgagcctggacgtgacggtgtcccaggagggccaggtatgaggggtatgcccgggtcccctggcggtcctggatcggatggaaaaccagggccaccaggttcgcagggtgaaagcggacgtccaggcccacccggcccttcaggtccaaggggtcagcctggtgtcatgggtttccccggtccaaagggtaatgacggagcaccgggtaaaaatggtgaacgtggtggcccaggtggtccaggaccccaaggtccaccaggaaaaaacggtgagacaggtcctcaaggacctccaggacctaccggtcctggaggagataagggagatacgggaccgccaggacctcaaggattgcaaggtttgcctggtacaggaggccctcccggagaaaatggtaagcctggagagccaggaccaaaaggcgatgctggagccccaggtgcacccggaggtaagggagacgccggtgctccgggtgagcgtggtcctccggcaattgctggtattggtggagaaaaggccggcggtttcgctccatattatggttaatcaagaggatgtcagaatgccatttgcctgagagatgcaggcttcatttttgatacttttttatttgtaacctatatagtataggattttttttgtcattttgtttcttctcgtacgagcttgctcctgatcagcctatctcgcagctgatgaatatcttgtggtaggggtttgggaaaatcattcgagtttgatgtttttcttggtatttcccactcctcttcagagtacagaagattaagtgagacgttcgtttgtgctccgga

SEQ ID NO: 1063 - DNA, 5298 bp, Artificial Sequence
  Plasmid
ggatccttcagtaatgtcttgtttcttttgttgcagtggtgagccattttgacttcgtgaaagtttctttagaatagttgtttccagaggccaaacattccacccgtagtaaagtgcaagcgtaggaagaccaagactggcataaatcaggtataagtgtcgagcactggcaggtgatcttctgaaagtttctactagcagataagatccagtagtcatgcatatggcaacaatgtaccgtgtggatctaagaacgcgtcctactaaccttcgcattcgttggtccagtttgttgttatcgatcaacgtgacaaggttgtcgattccgcgtaagcatgcatacccaaggacgcctgttgcaattccaagtgagccagttccaacaatctttgtaatattagagcacttcattgtgttgcgcttgaaagtaaaatgcgaacaaattaagagataatctcgaaaccgcgacttcaaacgccaatatgatgtgcggcacacaataagcgttcatatccgctgggtgactttctcgctttaaaaaattatccgaaaaaattttctagagtgttgttactttatacttccggctcgtataatacgacaaggtgtaaggaggactaaaccatggctaaactcacctctgctgttccagtcctgactgctcgtgatgttgctggtgctgttgagttctggactgataggctcggtttctcccgtgacttcgtagaggacgactttgccggtgttgtacgtgacgacgttaccctgttcatctccgcagttcaggaccaggttgtgccagacaacactctggcatgggtatgggttcgtggtctggacgaactgtacgctgagtggtctgaggtcgtgtctaccaacttccgtgatgcatctggtccagctatgaccgagatcggtgaacagccctggggtcgtgagtttgcactgcgtgatccagctggtaactgcgtgcatttcgtcgcagaagagcaggactaacaattgacaccttacgattatttagagagtatttattagttttattgtatgtatacggatgttttattatctatttatgcccttatattctgtaactatccaaaagtcctatcttatcaagccagcaatctatgtccgcgaacgtcaactaaaaataagctttttatgctcttctctctttttttcccttcggtataattataccttgcatccacagattctcctgccaaattttgcataatcctttacaacatggctatatgggagcacttagcgccctccaaaacccatattgcctacgcatgtataggtgttttttccacaatattttctctgtgctctctttttattaaagagaagctctatatcggagaagcttctgtggccgttatattcggccttatcgtgggaccacattgcctgaattggtttgccccggaagattggggaaacttggatctgattaccttagctgcagaaaagggtaccactgagcgtcagaccccgtagaaaagatcaaaggatcttcttgagatcctttttttctgcgcgtaatctgctgcttgcaaacaaaaaaaccaccgctaccagcggtggtttgtttgccggatcaagagctaccaactctttttccgaaggtaactggcttcagcagagcgcagataccaaatactgttcttctagtgtagccgtagttaggccaccacttcaagaactctgtagcaccgcctacatacctcgctctgctaatcctgttaccagtggctgctgccagtggcgataagtcgtgtcttaccgggttggacccaagacgatagttaccggataaggcgcagcggtcgggctgaacggggggttcgtgcacacagcccagcttggagcgaacgacctacaccgaactgagatacctacagcgtgagctatgagaaagcgccacgcttcccgaagggagaaaggcggacaggtatccggtaagcggcagggtcggaacaggagagcgcacgagggagcttccagggggaaacgcctggtatctttatagtcctgtcgggtttcgccacctctgacttgagcgtcgatttttgtgatgctcgtcaggggggcggagcctatggaaaaacgccagcaacgcggcctttttacggttcctggccttttgctggccttttgctcacatgtatttcagaagcgatagagagactgcgctaagcattaatgagattatttttgagcattcgtcaatcaataccaaacaagacaaacggtatgccgacttttggaagtttctttttgaccaactggccgttagcatttcaacgaaccaaacttagttcatcttggatgagatcacgcttttgtcatattaggttccaagacagcgtttaaactgtcagttttgggccatttggggaacatgaaactatttgaccccacactcagaaagccctcatctggagtgatgttcgggtgtaatgcggagcttgttgcattcggaaataaacaaacatgaacctcgccaggggggccaggatagacaggctaataaagtcatggtgttagtagcctaatagaaggaattggaatatttaaataatgtatctaaacgcaaactccgagctggaaaaatgttaccggcgatgcgcggacaatttagaggcggcgatcaagaaacacctgctgggcgagcagtctggagcacagtcttcgatgggcccgagatccgataaccgtgctgggtaccgggacgtgaggcagcgcgacatccatcaaatataccaggcgccaaccgagtctctcggaaaacagcttctggatatcttccgctggcggcgcaacgacgaataatagtccctggaggtgacggaatatatatgtgtggagggtaaatctgacagggtgtagcaaaggtaatattttcctaaaacatgcaatcggctgccccgcaacgggaaaaagaatgactttggcactcttcaccagagtggggtgtcccgctcgtgtgtgcaaataggctcccactggtcaccccggattttgcagaaaaacagcaagttccggggtgtctcactggtgtccgccaataagaggagccggcaggcacggagtctacatcaagctgtctccgatacactcgactaccatccgggtctctcagagaggggaatggcactataaataccgcctccttgcgctctctgccttcatcaatcaaatcatgtacaggaacttaataattgctactgcccttacttgcggtgcatacagtgcctacgtgccttccgaaccatggagcacactgacacctgatgctagccttgaaagtgccctcaaagattactcacaaacttttggaatagctattaagtccttagatgccgacaagattaagagagacgtcaaatctggtgttgctgttggaggtttagcaggctaccctggtcccgcagggcccccaggtccgccgggtccgcccggaacatcaggtcatcccggaagccctggttcaccaggttatcagggaccgcccggagagcctggacaagctggtccctccggaccccctggtccaccaggtgctattggaccaagtggtcctgccggaaaaagaggtgaatccggtagacctggtagacccggcgaaaggggtttaccaggtcctcccggaattaagggtccagccggtatacccggttttcctgggatgaagggtcacagaggatttagaggtagaaacggagagaaaggcgaaaccggtgctcccggactgaagggtgaaaacggtcttcctggtgagaacggcgctcctggacctatgggtccacgtggtgctccaggagaaagaggcagaccaggattgcctggtgcagctggtgctagaggtaacagaggtgcccgtggttccgatggacaacccgggccacccggccctccaggtaccgctggatttcctggaagccctggtgctaaggggagagttggtccggctggtagtcccggaagtaacggtgccccaggtcaaagaggcgaaccaggccctcagggtcacgcaggagcacagggaccgcctggtcctcctggtattaatggttcgcctggaggaaaaggtgaaatggggcccgcaggaatccccggtgcgcctggtcttatgggtgccaggggtcctccaggcccggccggtgcaaatggtgctcccggattacgaggaggagctggtagacctggtaaaaacggtgccaaaggagaaccaggtcctcgtggagagcgtggtgaagctggcattcccggtgtgcctggtgcaaaaggtgaggacggtaaggacggttcccctggtgagccaggtgcgaacggactgccaggtgcagccggagagcgaggagctccaggattcaggggaccagccggtcctaacggcattcctggtgaaaaagggcccgccggtgaaaggggagctcccggtccagcaggccctcgtggagcagctggtgagcctggacgtagaggtgtcccaggagggccaggtatgaggggtatgcccgggtcccctggcggtcctggatcggatggaaaaccagggccaccaggttcgcagggtgaaagcggacgtccaggcccacccggcccttcaggtccaaggggtcagcctggtgtcatgggtttccccggtccaaagggtaatgacggagcaccgggtaaaaatggtgaacgtggtggcccaggtggtccaggaccccaaggtccaccaggaaaaaacggtgagacaggtcctcaaggacctccaggacctaccggtcctggaggagataagggagatacgggaccgccaggacctcaaggattgcaaggtttgcctggtacaggaggccctcccggagaaaatggtaagcctggagagccaggaccaaaaggcgatgctggagccccaggtgcacccggaggtaagggagacgccggtgctccgggtgagcgtggtcctccggcaattgctggtattggtggagaaaaggccggcggtttcgctccatattatggttaatcaagaggatgtcagaatgccatttgcctgagagatgcaggcttcatttttgatacttttttatttgtaacctatatagtataggattttttttgtcattttgtttcttctcgtacgagcttgctcctgatcagcctatctcgcagctgatgaatatcttgtggtaggggtttgggaaaatcattcgagtttgatgtttttcttggtatttcccactcctcttcagagtacagaagattaagtgagacgttcgtttgtgctccgga

SEQ ID NO: 1064 - DNA, 5298 bp, Artificial Sequence
  Plasmid
ggatccttcagtaatgtcttgtttcttttgttgcagtggtgagccattttgacttcgtgaaagtttctttagaatagttgtttccagaggccaaacattccacccgtagtaaagtgcaagcgtaggaagaccaagactggcataaatcaggtataagtgtcgagcactggcaggtgatcttctgaaagtttctactagcagataagatccagtagtcatgcatatggcaacaatgtaccgtgtggatctaagaacgcgtcctactaaccttcgcattcgttggtccagtttgttgttatcgatcaacgtgacaaggttgtcgattccgcgtaagcatgcatacccaaggacgcctgttgcaattccaagtgagccagttccaacaatctttgtaatattagagcacttcattgtgttgcgcttgaaagtaaaatgcgaacaaattaagagataatctcgaaaccgcgacttcaaacgccaatatgatgtgcggcacacaataagcgttcatatccgctgggtgactttctcgctttaaaaaattatccgaaaaaattttctagagtgttgttactttatacttccggctcgtataatacgacaaggtgtaaggaggactaaaccatggctaaactcacctctgctgttccagtcctgactgctcgtgatgttgctggtgctgttgagttctggactgataggctcggtttctcccgtgacttcgtagaggacgactttgccggtgttgtacgtgacgacgttaccctgttcatctccgcagttcaggaccaggttgtgccagacaacactctggcatgggtatgggttcgtggtctggacgaactgtacgctgagtggtctgaggtcgtgtctaccaacttccgtgatgcatctggtccagctatgaccgagatcggtgaacagccctggggtcgtgagtttgcactgcgtgatccagctggtaactgcgtgcatttcgtcgcagaagagcaggactaacaattgacaccttacgattatttagagagtatttattagttttattgtatgtatacggatgttttattatctatttatgcccttatattctgtaactatccaaaagtcctatcttatcaagccagcaatctatgtccgcgaacgtcaactaaaaataagctttttatgctcttctctctttttttcccttcggtataattataccttgcatccacagattctcctgccaaattttgcataatcctttacaacatggctatatgggagcacttagcgccctccaaaacccatattgcctacgcatgtataggtgttttttccacaatattttctctgtgctctctttttattaaagagaagctctatatcggagaagcttctgtggccgttatattcggccttatcgtgggaccacattgcctgaattggtttgccccggaagattggggaaacttggatctgattaccttagctgcagaaaagggtaccactgagcgtcagaccccgtagaaaagatcaaaggatcttcttgagatcctttttttctgcgcgtaatctgctgcttgcaaacaaaaaaaccaccgctaccagcggtggtttgtttgccggatcaagagctaccaactctttttccgaaggtaactggcttcagcagagcgcagataccaaatactgttcttctagtgtagccgtagttaggccaccacttcaagaactctgtagcaccgcctacatacctcgctctgctaatcctgttaccagtggctgctgccagtggcgataagtcgtgtcttaccgggttggacccaagacgatagttaccggataaggcgcagcggtcgggctgaacggggggttcgtgcacacagcccagcttggagcgaacgacctacaccgaactgagatacctacagcgtgagctatgagaaagcgccacgcttcccgaagggagaaaggcggacaggtatccggtaagcggcagggtcggaacaggagagcgcacgagggagcttccagggggaaacgcctggtatctttatagtcctgtcgggtttcgccacctctgacttgagcgtcgatttttgtgatgctcgtcaggggggcggagcctatggaaaaacgccagcaacgcggcctttttacggttcctggccttttgctggccttttgctcacatgtatttcagaagcgatagagagactgcgctaagcattaatgagattatttttgagcattcgtcaatcaataccaaacaagacaaacggtatgccgacttttggaagtttctttttgaccaactggccgttagcatttcaacgaaccaaacttagttcatcttggatgagatcacgcttttgtcatattaggttccaagacagcgtttaaactgtcagttttgggccatttggggaacatgaaactatttgaccccacactcagaaagccctcatctggagtgatgttcgggtgtaatgcggagcttgttgcattcggaaataaacaaacatgaacctcgccaggggggccaggatagacaggctaataaagtcatggtgttagtagcctaatagaaggaattggaatatttaaataatgtatctaaacgcaaactccgagctggaaaaatgttaccggcgatgcgcggacaatttagaggcggcgatcaagaaacacctgctgggcgagcagtctggagcacagtcttcgatgggcccgagatccgataaccgtgctgggtaccgggacgtgaggcagcgcgacatccatcaaatataccaggcgccaaccgagtctctcggaaaacagcttctggatatcttccgctggcggcgcaacgacgaataatagtccctggaggtgacggaatatatatgtgtggagggtaaatctgacagggtgtagcaaaggtaatattttcctaaaacatgcaatcggctgccccgcaacgggaaaaagaatgactttggcactcttcaccagagtggggtgtcccgctcgtgtgtgcaaataggctcccactggtcaccccggattttgcagaaaaacagcaagttccggggtgtctcactggtgtccgccaataagaggagccggcaggcacggagtctacatcaagctgtctccgatacactcgactaccatccgggtctctcagagaggggaatggcactataaataccgcctccttgcgctctctgccttcatcaatcaaatcatgtacaggaacttaataattgctactgcccttacttgcggtgcatacagtgcctacgtgccttccgaaccatggagcacactgacacctgatgctagccttgaaagtgccctcaaagattactcacaaacttttggaatagctattaagtccttagatgccgacaagattaagagagacgtcaaatctggtgttgctgttggaggtttagcaggctaccctggtcccgcagggcccccaggtccgccgggtccgcccggaacatcaggtcatcccggaagccctggttcaccaggttatcagggaccgcccggagagcctggacaagctggtccctccggaccccctggtccaccaggtgctattggaccaagtggtcctgccggaaaaagaggtgaatccggtagacctggtagacccggcgaaaggggtttaccaggtcctcccggaattaagggtccagccggtatacccggttttcctgggatgaagggtcacagaggatttagaggtagaaacggagagaaaggcagaaccggtgctcccggactgaagggtgaaaacggtcttcctggtgagaacggcgctcctggacctatgggtccacgtggtgctccaggagaaagaggcagaccaggattgcctggtgcagctggtgctagaggtaacagaggtgcccgtggttccagaggacaacccgggccacccggccctccaggtaccgctggatttcctggaagccctggtgctaaggggagagttggtccggctggtagtcccggaagtaacggtgccccaggtcaaagaggcagaccaggccctcagggtcacgcaggagcacagggaccgcctggtcctcctggtattaatggttcgcctggaggaaaaggtagaatggggcccgcaggaatccccggtgcgcctggtcttatgggtgccaggggtcctccaggcccggccggtgcaaatggtgctcccggattacgaggaggagctggtagacctggtaaaaacggtgccaaaggaagaccaggtcctcgtggagagcgtggtagagctggcattcccggtgtgcctggtgcaaaaggtagacgtggtaagagaggttcccctggtgagccaggtgcgaacggactgccaggtgcagccggagagcgaggagctccaggattcaggggaccagccggtcctaacggcattcctggtgaaaaagggcccgccggtgaaaggggagctcccggtccagcaggccctcgtggagcagctggtagacctggacgtagaggtgtcccaggagggccaggtatgaggggtatgcccgggtcccctggcggtcctggatcgagaggaaaaccagggccaccaggttcgcagggtgaaagcggacgtccaggcccacccggcccttcaggtccaaggggtcagcctggtgtcatgggtttccccggtccaaagggtaatagaggagcaccgggtaaaaatggtagacgtggtggcccaggtggtccaggaccccaaggtccaccaggaaaaaacggtgagacaggtcctcaaggacctccaggacctaccggtcctggaggaagaaagggaagaacgggaccgccaggacctcaaggattgcaaggtttgcctggtacaggaggccctcccggagaaaatggtaagcctggaagaccaggaccaaaaggcgatgctggagccccaggtgcacccggaggtaagggacgtgccggtgctccgggtgagcgtggtcctccggcaattgctggtattggtggagaaaaggccggcggtttcgctccatattatggttaatcaagaggatgtcagaatgccatttgcctgagagatgcaggcttcatttttgatacttttttatttgtaacctatatagtataggattttttttgtcattttgtttcttctcgtacgagcttgctcctgatcagcctatctcgcagctgatgaatatcttgtggtaggggtttgggaaaatcattcgagtttgatgtttttcttggtatttcccactcctcttcagagtacagaagattaagtgagacgttcgtttgtgctccgga

SEQ ID NO: 1065 - DNA, 5298 bp, Artificial Sequence
  Plasmid
ggatccttcagtaatgtcttgtttcttttgttgcagtggtgagccattttgacttcgtgaaagtttctttagaatagttgtttccagaggccaaacattccacccgtagtaaagtgcaagcgtaggaagaccaagactggcataaatcaggtataagtgtcgagcactggcaggtgatcttctgaaagtttctactagcagataagatccagtagtcatgcatatggcaacaatgtaccgtgtggatctaagaacgcgtcctactaaccttcgcattcgttggtccagtttgttgttatcgatcaacgtgacaaggttgtcgattccgcgtaagcatgcatacccaaggacgcctgttgcaattccaagtgagccagttccaacaatctttgtaatattagagcacttcattgtgttgcgcttgaaagtaaaatgcgaacaaattaagagataatctcgaaaccgcgacttcaaacgccaatatgatgtgcggcacacaataagcgttcatatccgctgggtgactttctcgctttaaaaaattatccgaaaaaattttctagagtgttgttactttatacttccggctcgtataatacgacaaggtgtaaggaggactaaaccatggctaaactcacctctgctgttccagtcctgactgctcgtgatgttgctggtgctgttgagttctggactgataggctcggtttctcccgtgacttcgtagaggacgactttgccggtgttgtacgtgacgacgttaccctgttcatctccgcagttcaggaccaggttgtgccagacaacactctggcatgggtatgggttcgtggtctggacgaactgtacgctgagtggtctgaggtcgtgtctaccaacttccgtgatgcatctggtccagctatgaccgagatcggtgaacagccctggggtcgtgagtttgcactgcgtgatccagctggtaactgcgtgcatttcgtcgcagaagagcaggactaacaattgacaccttacgattatttagagagtatttattagttttattgtatgtatacggatgttttattatctatttatgcccttatattctgtaactatccaaaagtcctatcttatcaagccagcaatctatgtccgcgaacgtcaactaaaaataagctttttatgctcttctctctttttttcccttcggtataattataccttgcatccacagattctcctgccaaattttgcataatcctttacaacatggctatatgggagcacttagcgccctccaaaacccatattgcctacgcatgtataggtgttttttccacaatattttctctgtgctctctttttattaaagagaagctctatatcggagaagcttctgtggccgttatattcggccttatcgtgggaccacattgcctgaattggtttgccccggaagattggggaaacttggatctgattaccttagctgcagaaaagggtaccactgagcgtcagaccccgtagaaaagatcaaaggatcttcttgagatcctttttttctgcgcgtaatctgctgcttgcaaacaaaaaaaccaccgctaccagcggtggtttgtttgccggatcaagagctaccaactctttttccgaaggtaactggcttcagcagagcgcagataccaaatactgttcttctagtgtagccgtagttaggccaccacttcaagaactctgtagcaccgcctacatacctcgctctgctaatcctgttaccagtggctgctgccagtggcgataagtcgtgtcttaccgggttggacccaagacgatagttaccggataaggcgcagcggtcgggctgaacggggggttcgtgcacacagcccagcttggagcgaacgacctacaccgaactgagatacctacagcgtgagctatgagaaagcgccacgcttcccgaagggagaaaggcggacaggtatccggtaagcggcagggtcggaacaggagagcgcacgagggagcttccagggggaaacgcctggtatctttatagtcctgtcgggtttcgccacctctgacttgagcgtcgatttttgtgatgctcgtcaggggggcggagcctatggaaaaacgccagcaacgcggcctttttacggttcctggccttttgctggccttttgctcacatgtatttcagaagcgatagagagactgcgctaagcattaatgagattatttttgagcattcgtcaatcaataccaaacaagacaaacggtatgccgacttttggaagtttctttttgaccaactggccgttagcatttcaacgaaccaaacttagttcatcttggatgagatcacgcttttgtcatattaggttccaagacagcgtttaaactgtcagttttgggccatttggggaacatgaaactatttgaccccacactcagaaagccctcatctggagtgatgttcgggtgtaatgcggagcttgttgcattcggaaataaacaaacatgaacctcgccaggggggccaggatagacaggctaataaagtcatggtgttagtagcctaatagaaggaattggaatatttaaataatgtatctaaacgcaaactccgagctggaaaaatgttaccggcgatgcgcggacaatttagaggcggcgatcaagaaacacctgctgggcgagcagtctggagcacagtcttcgatgggcccgagatccgataaccgtgctgggtaccgggacgtgaggcagcgcgacatccatcaaatataccaggcgccaaccgagtctctcggaaaacagcttctggatatcttccgctggcggcgcaacgacgaataatagtccctggaggtgacggaatatatatgtgtggagggtaaatctgacagggtgtagcaaaggtaatattttcctaaaacatgcaatcggctgccccgcaacgggaaaaagaatgactttggcactcttcaccagagtggggtgtcccgctcgtgtgtgcaaataggctcccactggtcaccccggattttgcagaaaaacagcaagttccggggtgtctcactggtgtccgccaataagaggagccggcaggcacggagtctacatcaagctgtctccgatacactcgactaccatccgggtctctcagagaggggaatggcactataaataccgcctccttgcgctctctgccttcatcaatcaaatcatgtacaggaacttaataattgctactgcccttacttgcggtgcatacagtgcctacgtgccttccgaaccatggagcacactgacacctgatgctagccttgaaagtgccctcaaagattactcacaaacttttggaatagctattaagtccttagatgccgacaagattaagagagacgtcaaatctggtgttgctgttggaggtatgggtggctaccctggtcccgcagggcccccaggtccgccgggtccgcccggagtttcaggtcatcccggagcacctggtgcaccaggttatcagggaccgcccggagagcctggacaagctggtcccgcaggaccccctggtccaccaggtgctatgggaccagcaggtcctgccggaaaagacggtgaatccggtagacctggtagacccggcgaaaggggttttccaggtcctcccggaattaagggtccagccggtatgcccggttttcctgggatgaagggtcacagaggatttgatggtagaaacggagagaaaggcgataccggtgctcccggactgaagggtgaaaacggtcttcctggtgagaacggcgctcctggacctatgggtccacgtggtgctccaggagaaagaggcagaccaggattgcctggtgcagctggtgctagaggtaacgatggtgcccgtggttccgatggacaacccgggccacccggccctccaggtaccgctggatttcctggaagccctggtgctaagggggaggttggtccggctggtgctcccggaccaaacggtgccccaggtcaaagaggcgaaccaggccttcagggtcaggcaggagcaccgggaccgcctggtcctcctggtattaatggttcgcctggaggaaaaggtgaaatggggcccgcaggaatccccggtgcgcctggtcttatcggtgccaggggtcctccaggcccgccgggtgcaaatggtgtgcccggacagcgaggagctgctggtgaacctggtaaaaacggtgccaaaggagacccaggtgctcgtggagagcgtggtgaagctggcattcccggtattgcaggtcccaaaggtgaggacggtaaggacggttcccctggtgagccaggtgcgaacggactgccaggtgcaccaggagagcgaggaccaccaggattcaggggagcccctggtgctaacggcattcctggtgaaaaagggcccccaggtgaaaggggaggacccggtccagcaggccctcgtggagtcgctggtgagcctggacgtgacggtttgccaggagggccaggtttgaggggtattcccgggtcccctggcggtcctggatcggatggaaaaccagggccaccaggttcgcagggtgaaagcggacgtccaggcccacccggctcacctggtccaaggggtcagcctggtgtcatgggtttccccggtccaaagggtaatgacggagcaccgggtaaaaatggtgaacgtggtggcccaggtggtccaggattgcccggtccagcaggaaaaaacggtgagacaggtcctcaaggacctccaggacctaccggtcctgcaggagataagggagatgcaggaccgccaggacctcctggattgcaaggtttgcctggtacaggaggccctcccggagaaaatggtaagcctggagagccaggaccaaaaggcgatgtcggagccccaggtattcccggaggtaagggagacgccggtgctccgggtgagcgtggtcctccggcaattgctggtattggtggagaaaaggccggcggtttcgctccatattatggttaatcaagaggatgtcagaatgccatttgcctgagagatgcaggcttcatttttgatacttttttatttgtaacctatatagtataggattttttttgtcattttgtttcttctcgtacgagcttgctcctgatcagcctatctcgcagctgatgaatatcttgtggtaggggtttgggaaaatcattcgagtttgatgtttttcttggtatttcccactcctcttcagagtacagaagattaagtgagacgttcgtttgtgctccgga

SEQ ID NO: 1066 - DNA, 5298 bp, Artificial Sequence
  Plasmid
ggatccttcagtaatgtcttgtttcttttgttgcagtggtgagccattttgacttcgtgaaagtttctttagaatagttgtttccagaggccaaacattccacccgtagtaaagtgcaagcgtaggaagaccaagactggcataaatcaggtataagtgtcgagcactggcaggtgatcttctgaaagtttctactagcagataagatccagtagtcatgcatatggcaacaatgtaccgtgtggatctaagaacgcgtcctactaaccttcgcattcgttggtccagtttgttgttatcgatcaacgtgacaaggttgtcgattccgcgtaagcatgcatacccaaggacgcctgttgcaattccaagtgagccagttccaacaatctttgtaatattagagcacttcattgtgttgcgcttgaaagtaaaatgcgaacaaattaagagataatctcgaaaccgcgacttcaaacgccaatatgatgtgcggcacacaataagcgttcatatccgctgggtgactttctcgctttaaaaaattatccgaaaaaattttctagagtgttgttactttatacttccggctcgtataatacgacaaggtgtaaggaggactaaaccatggctaaactcacctctgctgttccagtcctgactgctcgtgatgttgctggtgctgttgagttctggactgataggctcggtttctcccgtgacttcgtagaggacgactttgccggtgttgtacgtgacgacgttaccctgttcatctccgcagttcaggaccaggttgtgccagacaacactctggcatgggtatgggttcgtggtctggacgaactgtacgctgagtggtctgaggtcgtgtctaccaacttccgtgatgcatctggtccagctatgaccgagatcggtgaacagccctggggtcgtgagtttgcactgcgtgatccagctggtaactgcgtgcatttcgtcgcagaagagcaggactaacaattgacaccttacgattatttagagagtatttattagttttattgtatgtatacggatgttttattatctatttatgcccttatattctgtaactatccaaaagtcctatcttatcaagccagcaatctatgtccgcgaacgtcaactaaaaataagctttttatgctcttctctctttttttcccttcggtataattataccttgcatccacagattctcctgccaaattttgcataatcctttacaacatggctatatgggagcacttagcgccctccaaaacccatattgcctacgcatgtataggtgttttttccacaatattttctctgtgctctctttttattaaagagaagctctatatcggagaagcttctgtggccgttatattcggccttatcgtgggaccacattgcctgaattggtttgccccggaagattggggaaacttggatctgattaccttagctgcagaaaagggtaccactgagcgtcagaccccgtagaaaagatcaaaggatcttcttgagatcctttttttctgcgcgtaatctgctgcttgcaaacaaaaaaaccaccgctaccagcggtggtttgtttgccggatcaagagctaccaactctttttccgaaggtaactggcttcagcagagcgcagataccaaatactgttcttctagtgtagccgtagttaggccaccacttcaagaactctgtagcaccgcctacatacctcgctctgctaatcctgttaccagtggctgctgccagtggcgataagtcgtgtcttaccgggttggacccaagacgatagttaccggataaggcgcagcggtcgggctgaacggggggttcgtgcacacagcccagcttggagcgaacgacctacaccgaactgagatacctacagcgtgagctatgagaaagcgccacgcttcccgaagggagaaaggcggacaggtatccggtaagcggcagggtcggaacaggagagcgcacgagggagcttccagggggaaacgcctggtatctttatagtcctgtcgggtttcgccacctctgacttgagcgtcgatttttgtgatgctcgtcaggggggcggagcctatggaaaaacgccagcaacgcggcctttttacggttcctggccttttgctggccttttgctcacatgtatttcagaagcgatagagagactgcgctaagcattaatgagattatttttgagcattcgtcaatcaataccaaacaagacaaacggtatgccgacttttggaagtttctttttgaccaactggccgttagcatttcaacgaaccaaacttagttcatcttggatgagatcacgcttttgtcatattaggttccaagacagcgtttaaactgtcagttttgggccatttggggaacatgaaactatttgaccccacactcagaaagccctcatctggagtgatgttcgggtgtaatgcggagcttgttgcattcggaaataaacaaacatgaacctcgccaggggggccaggatagacaggctaataaagtcatggtgttagtagcctaatagaaggaattggaatatttaaataatgtatctaaacgcaaactccgagctggaaaaatgttaccggcgatgcgcggacaatttagaggcggcgatcaagaaacacctgctgggcgagcagtctggagcacagtcttcgatgggcccgagatccgataaccgtgctgggtaccgggacgtgaggcagcgcgacatccatcaaatataccaggcgccaaccgagtctctcggaaaacagcttctggatatcttccgctggcggcgcaacgacgaataatagtccctggaggtgacggaatatatatgtgtggagggtaaatctgacagggtgtagcaaaggtaatattttcctaaaacatgcaatcggctgccccgcaacgggaaaaagaatgactttggcactcttcaccagagtggggtgtcccgctcgtgtgtgcaaataggctcccactggtcaccccggattttgcagaaaaacagcaagttccggggtgtctcactggtgtccgccaataagaggagccggcaggcacggagtctacatcaagctgtctccgatacactcgactaccatccgggtctctcagagaggggaatggcactataaataccgcctccttgcgctctctgccttcatcaatcaaatcatgtacaggaacttaataattgctactgcccttacttgcggtgcatacagtgcctacgtgccttccgaaccatggagcacactgacacctgatgctagccttgaaagtgccctcaaagattactcacaaacttttggaatagctattaagtccttagatgccgacaagattaagagagacgtcaaatctggtgttgctgttggaggtttagcaggctaccctggtcccgcagggcccccaggtccgccgggtccgcccggaacatcaggtcatcccggaagccctggttcaccaggttatcagggaccgcccggagagcctggacaagctggtccctccggaccccctggtccaccaggtgctattggaccaagtggtcctgccggaaaagacggtgaatccggtagacctggtagacccggcgaaaggggtttaccaggtcctcccggaattaagggtccagccggtatacccggttttcctgggatgaagggtcacagaggatttgatggtagaaacggagagaaaggcgaaaccggtgctcccggactgaagggtgaaaacggtcttcctggtgagaacggcgctcctggacctatgggtccacgtggtgctccaggagaaagaggcagaccaggattgcctggtgcagctggtgctagaggtaacgatggtgcccgtggttccgatggacaacccgggccacccggccctccaggtaccgctggatttcctggaagccctggtgctaagggggaggttggtccggctggtagtcccggaagtaacggtgccccaggtcaaagaggcgaaccaggccctcagggtcacgcaggagcacagggaccgcctggtcctcctggtattaatggttcgcctggaggaaaaggtgaaatggggcccgcaggaatccccggtgcgcctggtcttatgggtgccaggggtcctccaggcccggccggtgcaaatggtgctcccggattacgaggaggagctggtgaacctggtaaaaacggtgccaaaggagaaccaggtcctcgtggagagcgtggtgaagctggcattcccggtgtgcctggtgcaaaaggtgaggacggtaaggacggttcccctggtgagccaggtgcgaacggactgccaggtgcagccggagagcgaggagctccaggattcaggggaccagccggtcctaacggcgtggcaggtcctaaagggcccgccggtgaaaggggagctcccggtccagcaggccctaaaggagcagctggtgaggcaggacgtcccggtgaagcaggactgccaggtgcaaaaggtatgcccgggtcccctggcggtcctggacctgatggaaaaccagggccaccaggtccagcaggtcaggatggacgtccaggcccacccggccctccgggtgcaaggggtcaggcaggtgtcatgggtttccccggtccaaagggtgcagcaggagaaccgggtaaagcaggtgaacgtggtgtcccaggtccgccaggagcagtcggtccagcaggaaaagatggtgaggcaggtgcacaaggacctccaggacctgcaggtcctgcaggagagaggggagagcagggaccggcaggacctcaaggatttcaaggtttgcctggtcctgcaggccctcccggagaagcaggtaagcctggagagcaaggagtccccggcgatttgggagccccaggtgcacccggagcaaggggagagaggggtgctccgggtgagcgtggtcctccggcaattgctggtattggtggagaaaaggccggcggtttcgctccatattatggttaatcaagaggatgtcagaatgccatttgcctgagagatgcaggcttcatttttgatacttttttatttgtaacctatatagtataggattttttttgtcattttgtttcttctcgtacgagcttgctcctgatcagcctatctcgcagctgatgaatatcttgtggtaggggtttgggaaaatcattcgagtttgatgtttttcttggtatttcccactcctcttcagagtacagaagattaagtgagacgttcgtttgtgctccgga

SEQ ID NO: 1067 - DNA, 5253 bp, Artificial Sequence
  Plasmid
ggatccttcagtaatgtcttgtttcttttgttgcagtggtgagccattttgacttcgtgaaagtttctttagaatagttgtttccagaggccaaacattccacccgtagtaaagtgcaagcgtaggaagaccaagactggcataaatcaggtataagtgtcgagcactggcaggtgatcttctgaaagtttctactagcagataagatccagtagtcatgcatatggcaacaatgtaccgtgtggatctaagaacgcgtcctactaaccttcgcattcgttggtccagtttgttgttatcgatcaacgtgacaaggttgtcgattccgcgtaagcatgcatacccaaggacgcctgttgcaattccaagtgagccagttccaacaatctttgtaatattagagcacttcattgtgttgcgcttgaaagtaaaatgcgaacaaattaagagataatctcgaaaccgcgacttcaaacgccaatatgatgtgcggcacacaataagcgttcatatccgctgggtgactttctcgctttaaaaaattatccgaaaaaattttctagagtgttgttactttatacttccggctcgtataatacgacaaggtgtaaggaggactaaaccatggctaaactcacctctgctgttccagtcctgactgctcgtgatgttgctggtgctgttgagttctggactgataggctcggtttctcccgtgacttcgtagaggacgactttgccggtgttgtacgtgacgacgttaccctgttcatctccgcagttcaggaccaggttgtgccagacaacactctggcatgggtatgggttcgtggtctggacgaactgtacgctgagtggtctgaggtcgtgtctaccaacttccgtgatgcatctggtccagctatgaccgagatcggtgaacagccctggggtcgtgagtttgcactgcgtgatccagctggtaactgcgtgcatttcgtcgcagaagagcaggactaacaattgacaccttacgattatttagagagtatttattagttttattgtatgtatacggatgttttattatctatttatgcccttatattctgtaactatccaaaagtcctatcttatcaagccagcaatctatgtccgcgaacgtcaactaaaaataagctttttatgctcttctctctttttttcccttcggtataattataccttgcatccacagattctcctgccaaattttgcataatcctttacaacatggctatatgggagcacttagcgccctccaaaacccatattgcctacgcatgtataggtgttttttccacaatattttctctgtgctctctttttattaaagagaagctctatatcggagaagcttctgtggccgttatattcggccttatcgtgggaccacattgcctgaattggtttgccccggaagattggggaaacttggatctgattaccttagctgcagaaaagggtaccactgagcgtcagaccccgtagaaaagatcaaaggatcttcttgagatcctttttttctgcgcgtaatctgctgcttgcaaacaaaaaaaccaccgctaccagcggtggtttgtttgccggatcaagagctaccaactctttttccgaaggtaactggcttcagcagagcgcagataccaaatactgttcttctagtgtagccgtagttaggccaccacttcaagaactctgtagcaccgcctacatacctcgctctgctaatcctgttaccagtggctgctgccagtggcgataagtcgtgtcttaccgggttggacccaagacgatagttaccggataaggcgcagcggtcgggctgaacggggggttcgtgcacacagcccagcttggagcgaacgacctacaccgaactgagatacctacagcgtgagctatgagaaagcgccacgcttcccgaagggagaaaggcggacaggtatccggtaagcggcagggtcggaacaggagagcgcacgagggagcttccagggggaaacgcctggtatctttatagtcctgtcgggtttcgccacctctgacttgagcgtcgatttttgtgatgctcgtcaggggggcggagcctatggaaaaacgccagcaacgcggcctttttacggttcctggccttttgctggccttttgctcacatgtatttcagaagcgatagagagactgcgctaagcattaatgagattatttttgagcattcgtcaatcaataccaaacaagacaaacggtatgccgacttttggaagtttctttttgaccaactggccgttagcatttcaacgaaccaaacttagttcatcttggatgagatcacgcttttgtcatattaggttccaagacagcgtttaaactgtcagttttgggccatttggggaacatgaaactatttgaccccacactcagaaagccctcatctggagtgatgttcgggtgtaatgcggagcttgttgcattcggaaataaacaaacatgaacctcgccaggggggccaggatagacaggctaataaagtcatggtgttagtagcctaatagaaggaattggaatatttaaataatgtatctaaacgcaaactccgagctggaaaaatgttaccggcgatgcgcggacaatttagaggcggcgatcaagaaacacctgctgggcgagcagtctggagcacagtcttcgatgggcccgagatccgataaccgtgctgggtaccgggacgtgaggcagcgcgacatccatcaaatataccaggcgccaaccgagtctctcggaaaacagcttctggatatcttccgctggcggcgcaacgacgaataatagtccctggaggtgacggaatatatatgtgtggagggtaaatctgacagggtgtagcaaaggtaatattttcctaaaacatgcaatcggctgccccgcaacgggaaaaagaatgactttggcactcttcaccagagtggggtgtcccgctcgtgtgtgcaaataggctcccactggtcaccccggattttgcagaaaaacagcaagttccggggtgtctcactggtgtccgccaataagaggagccggcaggcacggagtctacatcaagctgtctccgatacactcgactaccatccgggtctctcagagaggggaatggcactataaataccgcctccttgcgctctctgccttcatcaatcaaatcatgtacaggaacttaataattgctactgcccttacttgcggtgcatacagtgcctacgtgccttccgaaccatggagcacactgacacctgatgctagccttgaaagtgccctcaaagattactcacaaacttttggaatagctattaagtccttagatgccgacaagattaagagagatagctacgacgtcaaatctggtgttgctgtcggaggtttagcaggctaccctggtcccgcagggcccccaggtccgccgggtccgcccggaacatcaggtcatcccggaagccctggttcaccaggttatcagggaccgcccggagagcctggacaagctggtccctccggaccccctggtccaccaggtgctattggaccaagtggtcctgccggaaaagacggtgaatccggtagacctggtagacccggcgaaaggggtttaccaggtcctcccggaattaagggtccagccggtatacccggttttcctgggatgaagggtcacagaggatttgatggtagaaacggagagaaaggcgaaaccggtgctcccggactgaagggtgaaaacggtcttcctggtgagaacggcgctcctggacctatgggtccacgtggtgctccaggagaaagaggcagaccaggattgcctggtgcagctggtgctagaggtaacgatggtgcccgtggttccgatggacaacccgggccacccggccctccaggtaccgctggatttcctggaagccctggtgctaagggggaggttggtccggctggtagtcccggaagtaacggtgccccaggtcaaagaggcgaaccaggccctcagggtcacgcaggagcacagggaccgcctggtcctcctggtattaatggttcgcctggaggaaaaggtgaaatggggcccgcaggaatccccggtgcgcctggtcttatgggtgccaggggtcctccaggcccggccggtgcaaatggtgctcccggattacgaggaggagctggtgaacctggtaaaaacggtgccaaaggagaaccaggtcctcgtggagagcgtggtgaagctggcattcccggtgtgcctggtgcaaaaggtgaggacggtaaggacggttcccctggtgagccaggtgcgaacggactgccaggtgcagccggagagcgaggagctccaggattcaggggaccagccggtcctaacggcattcctggtgaaaaagggcccgccggtgaaaggggagctcccggtccagcaggccctcgtggagcagctggtgagcctggacgtgacggtgtcccaggagggccaggtatgaggggtatgcccgggtcccctggcggtcctggatcggatggaaaaccagggccaccaggttcgcagggtgaaagcggacgtccaggcccacccggcccttcaggtccaaggggtcagcctggtgtcatgggtttccccggtccaaagggtaatgacggagcaccgggtaaaaatggtgaacgtggtggcccaggtggtccaggaccccaaggtccaccaggaaaaaacggtgagacaggtcctcaaggacctccaggacctaccggtcctggaggagataagggagatacgggaccgccaggacctcaaggattgcaaggtttgcctggtacaggaggccctcccggagaaaatggtaagcctggagagccaggaccaaaaggcgatgctggagccccaggtgcacccggaggtaagggagacgccggtgctccgggtgagcgtggtcctccgtaatcaagaggatgtcagaatgccatttgcctgagagatgcaggcttcatttttgatacttttttatttgtaacctatatagtataggattttttttgtcattttgtttcttctcgtacgagcttgctcctgatcagcctatctcgcagctgatgaatatcttgtggtaggggtttgggaaaatcattcgagtttgatgtttttcttggtatttcccactcctcttcagagtacagaagattaagtgagacgttcgtttgtgctccgga

SEQ ID NO: 1068 - DNA, 5328 bp, Artificial Sequence
  Plasmid
ggatccttcagtaatgtcttgtttcttttgttgcagtggtgagccattttgacttcgtgaaagtttctttagaatagttgtttccagaggccaaacattccacccgtagtaaagtgcaagcgtaggaagaccaagactggcataaatcaggtataagtgtcgagcactggcaggtgatcttctgaaagtttctactagcagataagatccagtagtcatgcatatggcaacaatgtaccgtgtggatctaagaacgcgtcctactaaccttcgcattcgttggtccagtttgttgttatcgatcaacgtgacaaggttgtcgattccgcgtaagcatgcatacccaaggacgcctgttgcaattccaagtgagccagttccaacaatctttgtaatattagagcacttcattgtgttgcgcttgaaagtaaaatgcgaacaaattaagagataatctcgaaaccgcgacttcaaacgccaatatgatgtgcggcacacaataagcgttcatatccgctgggtgactttctcgctttaaaaaattatccgaaaaaattttctagagtgttgttactttatacttccggctcgtataatacgacaaggtgtaaggaggactaaaccatggctaaactcacctctgctgttccagtcctgactgctcgtgatgttgctggtgctgttgagttctggactgataggctcggtttctcccgtgacttcgtagaggacgactttgccggtgttgtacgtgacgacgttaccctgttcatctccgcagttcaggaccaggttgtgccagacaacactctggcatgggtatgggttcgtggtctggacgaactgtacgctgagtggtctgaggtcgtgtctaccaacttccgtgatgcatctggtccagctatgaccgagatcggtgaacagccctggggtcgtgagtttgcactgcgtgatccagctggtaactgcgtgcatttcgtcgcagaagagcaggactaacaattgacaccttacgattatttagagagtatttattagttttattgtatgtatacggatgttttattatctatttatgcccttatattctgtaactatccaaaagtcctatcttatcaagccagcaatctatgtccgcgaacgtcaactaaaaataagctttttatgctcttctctctttttttcccttcggtataattataccttgcatccacagattctcctgccaaattttgcataatcctttacaacatggctatatgggagcacttagcgccctccaaaacccatattgcctacgcatgtataggtgttttttccacaatattttctctgtgctctctttttattaaagagaagctctatatcggagaagcttctgtggccgttatattcggccttatcgtgggaccacattgcctgaattggtttgccccggaagattggggaaacttggatctgattaccttagctgcagaaaagggtaccactgagcgtcagaccccgtagaaaagatcaaaggatcttcttgagatcctttttttctgcgcgtaatctgctgcttgcaaacaaaaaaaccaccgctaccagcggtggtttgtttgccggatcaagagctaccaactctttttccgaaggtaactggcttcagcagagcgcagataccaaatactgttcttctagtgtagccgtagttaggccaccacttcaagaactctgtagcaccgcctacatacctcgctctgctaatcctgttaccagtggctgctgccagtggcgataagtcgtgtcttaccgggttggacccaagacgatagttaccggataaggcgcagcggtcgggctgaacggggggttcgtgcacacagcccagcttggagcgaacgacctacaccgaactgagatacctacagcgtgagctatgagaaagcgccacgcttcccgaagggagaaaggcggacaggtatccggtaagcggcagggtcggaacaggagagcgcacgagggagcttccagggggaaacgcctggtatctttatagtcctgtcgggtttcgccacctctgacttgagcgtcgatttttgtgatgctcgtcaggggggcggagcctatggaaaaacgccagcaacgcggcctttttacggttcctggccttttgctggccttttgctcacatgtatttcagaagcgatagagagactgcgctaagcattaatgagattatttttgagcattcgtcaatcaataccaaacaagacaaacggtatgccgacttttggaagtttctttttgaccaactggccgttagcatttcaacgaaccaaacttagttcatcttggatgagatcacgcttttgtcatattaggttccaagacagcgtttaaactgtcagttttgggccatttggggaacatgaaactatttgaccccacactcagaaagccctcatctggagtgatgttcgggtgtaatgcggagcttgttgcattcggaaataaacaaacatgaacctcgccaggggggccaggatagacaggctaataaagtcatggtgttagtagcctaatagaaggaattggaatatttaaataatgtatctaaacgcaaactccgagctggaaaaatgttaccggcgatgcgcggacaatttagaggcggcgatcaagaaacacctgctgggcgagcagtctggagcacagtcttcgatgggcccgagatccgataaccgtgctgggtaccgggacgtgaggcagcgcgacatccatcaaatataccaggcgccaaccgagtctctcggaaaacagcttctggatatcttccgctggcggcgcaacgacgaataatagtccctggaggtgacggaatatatatgtgtggagggtaaatctgacagggtgtagcaaaggtaatattttcctaaaacatgcaatcggctgccccgcaacgggaaaaagaatgactttggcactcttcaccagagtggggtgtcccgctcgtgtgtgcaaataggctcccactggtcaccccggattttgcagaaaaacagcaagttccggggtgtctcactggtgtccgccaataagaggagccggcaggcacggagtctacatcaagctgtctccgatacactcgactaccatccgggtctctcagagaggggaatggcactataaataccgcctccttgcgctctctgccttcatcaatcaaatcatgtacaggaacttaataattgctactgcccttacttgcggtgcatacagtgcctacgtgccttccgaaccatggagcacactgacacctgatgctagccttgaaagtgccctcaaagattactcacaaacttttggaatagctattaagtccttagatgccgacaagattaagagagacgtcaaatctggtgttgctgttggaaaaacaacaaaatcaggtttagcaggctaccctggtcccgcagggcccccaggtccgccgggtccgcccggaacatcaggtcatcccggaagccctggttcaccaggttatcagggaccgcccggagagcctggacaagctggtccctccggaccccctggtccaccaggtgctattggaccaagtggtcctgccggaaaagacggtgaatccggtagacctggtagacccggcgaaaggggtttaccaggtcctcccggaattaagggtccagccggtatacccggttttcctgggatgaagggtcacagaggatttgatggtagaaacggagagaaaggcgaaaccggtgctcccggactgaagggtgaaaacggtcttcctggtgagaacggcgctcctggacctatgggtccacgtggtgctccaggagaaagaggcagaccaggattgcctggtgcagctggtgctagaggtaacgatggtgcccgtggttccgatggacaacccgggccacccggccctccaggtaccgctggatttcctggaagccctggtgctaagggggaggttggtccggctggtagtcccggaagtaacggtgccccaggtcaaagaggcgaaccaggccctcagggtcacgcaggagcacagggaccgcctggtcctcctggtattaatggttcgcctggaggaaaaggtgaaatggggcccgcaggaatccccggtgcgcctggtcttatgggtgccaggggtcctccaggcccggccggtgcaaatggtgctcccggattacgaggaggagctggtgaacctggtaaaaacggtgccaaaggagaaccaggtcctcgtggagagcgtggtgaagctggcattcccggtgtgcctggtgcaaaaggtgaggacggtaaggacggttcccctggtgagccaggtgcgaacggactgccaggtgcagccggagagcgaggagctccaggattcaggggaccagccggtcctaacggcattcctggtgaaaaagggcccgccggtgaaaggggagctcccggtccagcaggccctcgtggagcagctggtgagcctggacgtgacggtgtcccaggagggccaggtatgaggggtatgcccgggtcccctggcggtcctggatcggatggaaaaccagggccaccaggttcgcagggtgaaagcggacgtccaggcccacccggcccttcaggtccaaggggtcagcctggtgtcatgggtttccccggtccaaagggtaatgacggagcaccgggtaaaaatggtgaacgtggtggcccaggtggtccaggaccccaaggtccaccaggaaaaaacggtgagacaggtcctcaaggacctccaggacctaccggtcctggaggagataagggagatacgggaccgccaggacctcaaggattgcaaggtttgcctggtacaggaggccctcccggagaaaatggtaagcctggagagccaggaccaaaaggcgatgctggagccccaggtgcacccggaggtaagggagacgccggtgctccgggtgagcgtggtcctccgaaaacaacaaaatcagcaattgctggtattggtggagaaaaggccggcggtttcgctccatattatggttaatcaagaggatgtcagaatgccatttgcctgagagatgcaggcttcatttttgatacttttttatttgtaacctatatagtataggattttttttgtcattttgtttcttctcgtacgagcttgctcctgatcagcctatctcgcagctgatgaatatcttgtggtaggggtttgggaaaatcattcgagtttgatgtttttcttggtatttcccactcctcttcagagtacagaagattaagtgagacgttcgtttgtgctccgga

SEQ ID NO: 1069 - DNA, 5328 bp, Artificial Sequence; identical to SEQ ID NO: 1068
  Plasmid

SEQ ID NO: 1070 - DNA, 5328 bp, Artificial Sequence
  Plasmid
ggatccttcagtaatgtcttgtttcttttgttgcagtggtgagccattttgacttcgtgaaagtttctttagaatagttgtttccagaggccaaacattccacccgtagtaaagtgcaagcgtaggaagaccaagactggcataaatcaggtataagtgtcgagcactggcaggtgatcttctgaaagtttctactagcagataagatccagtagtcatgcatatggcaacaatgtaccgtgtggatctaagaacgcgtcctactaaccttcgcattcgttggtccagtttgttgttatcgatcaacgtgacaaggttgtcgattccgcgtaagcatgcatacccaaggacgcctgttgcaattccaagtgagccagttccaacaatctttgtaatattagagcacttcattgtgttgcgcttgaaagtaaaatgcgaacaaattaagagataatctcgaaaccgcgacttcaaacgccaatatgatgtgcggcacacaataagcgttcatatccgctgggtgactttctcgctttaaaaaattatccgaaaaaattttctagagtgttgttactttatacttccggctcgtataatacgacaaggtgtaaggaggactaaaccatggctaaactcacctctgctgttccagtcctgactgctcgtgatgttgctggtgctgttgagttctggactgataggctcggtttctcccgtgacttcgtagaggacgactttgccggtgttgtacgtgacgacgttaccctgttcatctccgcagttcaggaccaggttgtgccagacaacactctggcatgggtatgggttcgtggtctggacgaactgtacgctgagtggtctgaggtcgtgtctaccaacttccgtgatgcatctggtccagctatgaccgagatcggtgaacagccctggggtcgtgagtttgcactgcgtgatccagctggtaactgcgtgcatttcgtcgcagaagagcaggactaacaattgacaccttacgattatttagagagtatttattagttttattgtatgtatacggatgttttattatctatttatgcccttatattctgtaactatccaaaagtcctatcttatcaagccagcaatctatgtccgcgaacgtcaactaaaaataagctttttatgctcttctctctttttttcccttcggtataattataccttgcatccacagattctcctgccaaattttgcataatcctttacaacatggctatatgggagcacttagcgccctccaaaacccatattgcctacgcatgtataggtgttttttccacaatattttctctgtgctctctttttattaaagagaagctctatatcggagaagcttctgtggccgttatattcggccttatcgtgggaccacattgcctgaattggtttgccccggaagattggggaaacttggatctgattaccttagctgcagaaaagggtaccactgagcgtcagaccccgtagaaaagatcaaaggatcttcttgagatcctttttttctgcgcgtaatctgctgcttgcaaacaaaaaaaccaccgctaccagcggtggtttgtttgccggatcaagagctaccaactctttttccgaaggtaactggcttcagcagagcgcagataccaaatactgttcttctagtgtagccgtagttaggccaccacttcaagaactctgtagcaccgcctacatacctcgctctgctaatcctgttaccagtggctgctgccagtggcgataagtcgtgtcttaccgggttggacccaagacgatagttaccggataaggcgcagcggtcgggctgaacggggggttcgtgcacacagcccagcttggagcgaacgacctacaccgaactgagatacctacagcgtgagctatgagaaagcgccacgcttcccgaagggagaaaggcggacaggtatccggtaagcggcagggtcggaacaggagagcgcacgagggagcttccagggggaaacgcctggtatctttatagtcctgtcgggtttcgccacctctgacttgagcgtcgatttttgtgatgctcgtcaggggggcggagcctatggaaaaacgccagcaacgcggcctttttacggttcctggccttttgctggccttttgctcacatgtatttcagaagcgatagagagactgcgctaagcattaatgagattatttttgagcattcgtcaatcaataccaaacaagacaaacggtatgccgacttttggaagtttctttttgaccaactggccgttagcatttcaacgaaccaaacttagttcatcttggatgagatcacgcttttgtcatattaggttccaagacagcgtttaaactgtcagttttgggccatttggggaacatgaaactatttgaccccacactcagaaagccctcatctggagtgatgttcgggtgtaatgcggagcttgttgcattcggaaataaacaaacatgaacctcgccaggggggccaggatagacaggctaataaagtcatggtgttagtagcctaatagaaggaattggaatatttaaataatgtatctaaacgcaaactccgagctggaaaaatgttaccggcgatgcgcggacaatttagaggcggcgatcaagaaacacctgctgggcgagcagtctggagcacagtcttcgatgggcccgagatccgataaccgtgctgggtaccgggacgtgaggcagcgcgacatccatcaaatataccaggcgccaaccgagtctctcggaaaacagcttctggatatcttccgctggcggcgcaacgacgaataatagtccctggaggtgacggaatatatatgtgtggagggtaaatctgacagggtgtagcaaaggtaatattttcctaaaacatgcaatcggctgccccgcaacgggaaaaagaatgactttggcactcttcaccagagtggggtgtcccgctcgtgtgtgcaaataggctcccactggtcaccccggattttgcagaaaaacagcaagttccggggtgtctcactggtgtccgccaataagaggagccggcaggcacggagtctacatcaagctgtctccgatacactcgactaccatccgggtctctcagagaggggaatggcactataaataccgcctccttgcgctctctgccttcatcaatcaaatcatgtacaggaacttaataattgctactgcccttacttgcggtgcatacagtgcctacgtgccttccgaaccatggagcacactgacacctgatgctagccttgaaagtgccctcaaagattactcacaaacttttggaatagctattaagtccttagatgccgacaagattaagagagacgtcaaatctggtgttgctgttggaaaaacaacaaaatcaggtttagcaggctaccctggtcccgcagggcccccaggtccgccgggtccgcccggaacatcaggtcatcccggaagccctggttcaccaggttatcagggaccgcccggagagcctggacaagctggtccctccggaccccctggtccaccaggtgctattggaccaagtggtcctgccggaaaagacggtgaatccggtagacctggtagacccggcgccgctggtttaccaggtcctcccggaattaagggtccagccggtatacccggttttcctgggatgaagggtcacagaggatttgatggtagaaacggagagaaaggcgaaaccggtgctcccggactgaagggtgaaaacggtcttcctggtgccgctggcgctcctggacctatgggtccacgtggtgctccaggagccgctggcagaccaggattgcctggtgcagctggtgctagaggtaacgatggtgcccgtggttccgatggacaacccgggccacccggccctccaggtaccgctggatttcctggaagccctggtgctaagggggaggttggtccggctggtagtcccggaagtaacggtgccccaggtcaaagaggcgaaccaggccctcagggtcacgcaggagcacagggaccgcctggtcctcctggtattaatggttcgcctggaggaaaaggtgaaatggggcccgcaggaatccccggtgcgcctggtcttatgggtgccaggggtcctccaggcccggccggtgcaaatggtgctcccggattacgaggaggagctggtgaacctggtaaaaacggtgccaaaggagaaccaggtcctcgtggagagcgtggtgaagctggcattcccggtgtgcctggtgcaaaaggtgaggacggtaaggacggttcccctggtgagccaggtgcgaacggactgccaggtgcagccggagagcgaggagctccaggattcaggggaccagccggtcctaacggcattcctggtgaaaaagggcccgccggtgaaaggggagctcccggtccagcaggccctcgtggagcagctggtgagcctggacgtgacggtgtcccaggagggccaggtatgaggggtatgcccgggtcccctggcggtcctggatcggatggaaaaccagggccaccaggttcgcagggtgaaagcggacgtccaggcccacccggcccttcaggtccaaggggtcagcctggtgtcatgggtttccccggtccaaagggtaatgacggagcaccgggtaaaaatggtgaacgtggtggcccaggtggtccaggaccccaaggtccaccaggaaaaaacggtgagacaggtcctcaaggacctccaggacctaccggtcctggaggagataagggagatacgggaccgccaggacctcaaggattgcaaggtttgcctggtacaggaggccctcccggagaaaatggtaagcctggagagccaggaccaaaaggcgatgctggagccccaggtgcacccggaggtaagggagacgccggtgctccgggtgccgctggtcctccgaaaacaacaaaatcagcaattgctggtattggtggagaaaaggccggcggtttcgctccatattatggttaatcaagaggatgtcagaatgccatttgcctgagagatgcaggcttcatttttgatacttttttatttgtaacctatatagtataggattttttttgtcattttgtttcttctcgtacgagcttgctcctgatcagcctatctcgcagctgatgaatatcttgtggtaggggtttgggaaaatcattcgagtttgatgtttttcttggtatttcccactcctcttcagagtacagaagattaagtgagacgttcgtttgtgctccgga

SEQ ID NO: 1071 - DNA, 5298 bp, Artificial Sequence
  Plasmid
ggatccttcagtaatgtcttgtttcttttgttgcagtggtgagccattttgacttcgtgaaagtttctttagaatagttgtttccagaggccaaacattccacccgtagtaaagtgcaagcgtaggaagaccaagactggcataaatcaggtataagtgtcgagcactggcaggtgatcttctgaaagtttctactagcagataagatccagtagtcatgcatatggcaacaatgtaccgtgtggatctaagaacgcgtcctactaaccttcgcattcgttggtccagtttgttgttatcgatcaacgtgacaaggttgtcgattccgcgtaagcatgcatacccaaggacgcctgttgcaattccaagtgagccagttccaacaatctttgtaatattagagcacttcattgtgttgcgcttgaaagtaaaatgcgaacaaattaagagataatctcgaaaccgcgacttcaaacgccaatatgatgtgcggcacacaataagcgttcatatccgctgggtgactttctcgctttaaaaaattatccgaaaaaattttctagagtgttgttactttatacttccggctcgtataatacgacaaggtgtaaggaggactaaaccatggctaaactcacctctgctgttccagtcctgactgctcgtgatgttgctggtgctgttgagttctggactgataggctcggtttctcccgtgacttcgtagaggacgactttgccggtgttgtacgtgacgacgttaccctgttcatctccgcagttcaggaccaggttgtgccagacaacactctggcatgggtatgggttcgtggtctggacgaactgtacgctgagtggtctgaggtcgtgtctaccaacttccgtgatgcatctggtccagctatgaccgagatcggtgaacagccctggggtcgtgagtttgcactgcgtgatccagctggtaactgcgtgcatttcgtcgcagaagagcaggactaacaattgacaccttacgattatttagagagtatttattagttttattgtatgtatacggatgttttattatctatttatgcccttatattctgtaactatccaaaagtcctatcttatcaagccagcaatctatgtccgcgaacgtcaactaaaaataagctttttatgctcttctctctttttttcccttcggtataattataccttgcatccacagattctcctgccaaattttgcataatcctttacaacatggctatatgggagcacttagcgccctccaaaacccatattgcctacgcatgtataggtgttttttccacaatattttctctgtgctctctttttattaaagagaagctctatatcggagaagcttctgtggccgttatattcggccttatcgtgggaccacattgcctgaattggtttgccccggaagattggggaaacttggatctgattaccttagctgcagaaaagggtaccactgagcgtcagaccccgtagaaaagatcaaaggatcttcttgagatcctttttttctgcgcgtaatctgctgcttgcaaacaaaaaaaccaccgctaccagcggtggtttgtttgccggatcaagagctaccaactctttttccgaaggtaactggcttcagcagagcgcagataccaaatactgttcttctagtgtagccgtagttaggccaccacttcaagaactctgtagcaccgcctacatacctcgctctgctaatcctgttaccagtggctgctgccagtggcgataagtcgtgtcttaccgggttggacccaagacgatagttaccggataaggcgcagcggtcgggctgaacggggggttcgtgcacacagcccagcttggagcgaacgacctacaccgaactgagatacctacagcgtgagctatgagaaagcgccacgcttcccgaagggagaaaggcggacaggtatccggtaagcggcagggtcggaacaggagagcgcacgagggagcttccagggggaaacgcctggtatctttatagtcctgtcgggtttcgccacctctgacttgagcgtcgatttttgtgatgctcgtcaggggggcggagcctatggaaaaacgccagcaacgcggcctttttacggttcctggccttttgctggccttttgctcacatgtatttcagaagcgatagagagactgcgctaagcattaatgagattatttttgagcattcgtcaatcaataccaaacaagacaaacggtatgccgacttttggaagtttctttttgaccaactggccgttagcatttcaacgaaccaaacttagttcatcttggatgagatcacgcttttgtcatattaggttccaagacagcgtttaaactgtcagttttgggccatttggggaacatgaaactatttgaccccacactcagaaagccctcatctggagtgatgttcgggtgtaatgcggagcttgttgcattcggaaataaacaaacatgaacctcgccaggggggccaggatagacaggctaataaagtcatggtgttagtagcctaatagaaggaattggaatatttaaataatgtatctaaacgcaaactccgagctggaaaaatgttaccggcgatgcgcggacaatttagaggcggcgatcaagaaacacctgctgggcgagcagtctggagcacagtcttcgatgggcccgagatccgataaccgtgctgggtaccgggacgtgaggcagcgcgacatccatcaaatataccaggcgccaaccgagtctctcggaaaacagcttctggatatcttccgctggcggcgcaacgacgaataatagtccctggaggtgacggaatatatatgtgtggagggtaaatctgacagggtgtagcaaaggtaatattttcctaaaacatgcaatcggctgccccgcaacgggaaaaagaatgactttggcactcttcaccagagtggggtgtcccgctcgtgtgtgcaaataggctcccactggtcaccccggattttgcagaaaaacagcaagttccggggtgtctcactggtgtccgccaataagaggagccggcaggcacggagtctacatcaagctgtctccgatacactcgactaccatccgggtctctcagagaggggaatggcactataaataccgcctccttgcgctctctgccttcatcaatcaaatcatgtacaggaacttaataattgctactgcccttacttgcggtgcatacagtgcctacgtgccttccgaaccatggagcacactgacacctgatgctagccttgaaagtgccctcaaagattactcacaaacttttggaatagctattaagtccttagatgccgacaagattaagagagacgtcaaatctggtgttgctgttggaggtttagcaggctaccctggtcccgcagggcccccaggtccgccgggtccgcccggaacatcaggtcatcccggaagccctggttcaccaggttatcagggaccgcccggagagcctggacaagctggtccctccggaccccctggtccaccaggtgctattggaccaagtggtcctgccggaaaagacggtgaatccggtagacctggtagacccggcgaaaggggtttaccaggtcctcccggaattaagggtccagccggtatacccggttttcctgggatgaagggtcacagaggatttgatggtagaaacggagagaaaggcgaaaccggtgctcccggactgaagggtgaaaacggtcttcctggtgagaacggcgctcctggacctatgggtccacgtggtgctccaggagaaagaggcagaccaggattgcctggtgcagctggtgctagaggtaacgatggtgcccgtggttccgatggacaacccgggccacccggccctccaggtaccgctggatttcctggaagccctggtgctaagggggaggttggtccggctggtagtcccggaagtaacggtgccccaggtcaaagaggcgaaccaggccctcagggtcacgcaggagcacagggaccgcctggtcctcctggtattaatggttcgcctggaggaaaaggtgaaatggggcccgcaggaatccccggtgcgcctggtcttatgggtgccaggggtcctccaggcccggccggtgcaaatggtgctcccggattacgaggaggagctggtgaacctggtaaaaacggtgccaaaggagaaccaggtcctcgtggagagcgtggtgaagctggcattcccggtgtgcctggtgcaaaaggtgaggagggtaagcgaggtgcacgaggtgaggcaggttcggcgggacctccaggtcctccaggattacgaggagctccaggattcaggggattaccaggtgcagatggcagggcaggtgtgatggggccccctggtgaaaggggagctcccggtccagcaggcgtgcgtggagcagctggtgatgcaggacgtcctggtgaaccaggattaatgggtcctaggggtttacccgggtcccctggcggtcctggacctgcaggaaaagaagggccagtgggtttacctggtattgatggacgtccaggcccaattggccctgcaggtgcaaggggtgaacctggtgtcatgggtttccccggtccaaagggtaatgacggagatccgggtaaaaatggtgacaaaggtcacgcaggtttagcaggagcaaggggtgcaccaggacccgatggtgagacaggtcctcaaggacctccaggacctaccggtcctggaggagataagggagatacgggaccgccaggacctcaaggattgcaaggtttgcctggtacaggaggccctcccggagaaaatggtaagcctggagagccaggaccaaaaggcgatgctggagccccaggtgcacccggaggtaagggagacgccggtgctccgggtgagcgtggtcctccggcaattgctggtattggtggagaaaaggccggcggtttcgctccatattatggttaatcaagaggatgtcagaatgccatttgcctgagagatgcaggcttcatttttgatacttttttatttgtaacctatatagtataggattttttttgtcattttgtttcttctcgtacgagcttgctcctgatcagcctatctcgcagctgatgaatatcttgtggtaggggtttgggaaaatcattcgagtttgatgtttttcttggtatttcccactcctcttcagagtacagaagattaagtgagacgttcgtttgtgctccgga

SEQ ID NO: 1072 - DNA, 5298 bp, Artificial Sequence; identical to SEQ ID NO: 1065
  Plasmid

SEQ ID NO: 1073 - DNA, 5298 bp, Artificial Sequence
  Plasmid
ggatccttcagtaatgtcttgtttcttttgttgcagtggtgagccattttgacttcgtgaaagtttctttagaatagttgtttccagaggccaaacattccacccgtagtaaagtgcaagcgtaggaagaccaagactggcataaatcaggtataagtgtcgagcactggcaggtgatcttctgaaagtttctactagcagataagatccagtagtcatgcatatggcaacaatgtaccgtgtggatctaagaacgcgtcctactaaccttcgcattcgttggtccagtttgttgttatcgatcaacgtgacaaggttgtcgattccgcgtaagcatgcatacccaaggacgcctgttgcaattccaagtgagccagttccaacaatctttgtaatattagagcacttcattgtgttgcgcttgaaagtaaaatgcgaacaaattaagagataatctcgaaaccgcgacttcaaacgccaatatgatgtgcggcacacaataagcgttcatatccgctgggtgactttctcgctttaaaaaattatccgaaaaaattttctagagtgttgttactttatacttccggctcgtataatacgacaaggtgtaaggaggactaaaccatggctaaactcacctctgctgttccagtcctgactgctcgtgatgttgctggtgctgttgagttctggactgataggctcggtttctcccgtgacttcgtagaggacgactttgccggtgttgtacgtgacgacgttaccctgttcatctccgcagttcaggaccaggttgtgccagacaacactctggcatgggtatgggttcgtggtctggacgaactgtacgctgagtggtctgaggtcgtgtctaccaacttccgtgatgcatctggtccagctatgaccgagatcggtgaacagccctggggtcgtgagtttgcactgcgtgatccagctggtaactgcgtgcatttcgtcgcagaagagcaggactaacaattgacaccttacgattatttagagagtatttattagttttattgtatgtatacggatgttttattatctatttatgcccttatattctgtaactatccaaaagtcctatcttatcaagccagcaatctatgtccgcgaacgtcaactaaaaataagctttttatgctcttctctctttttttcccttcggtataattataccttgcatccacagattctcctgccaaattttgcataatcctttacaacatggctatatgggagcacttagcgccctccaaaacccatattgcctacgcatgtataggtgttttttccacaatattttctctgtgctctctttttattaaagagaagctctatatcggagaagcttctgtggccgttatattcggccttatcgtgggaccacattgcctgaattggtttgccccggaagattggggaaacttggatctgattaccttagctgcagaaaagggtaccactgagcgtcagaccccgtagaaaagatcaaaggatcttcttgagatcctttttttctgcgcgtaatctgctgcttgcaaacaaaaaaaccaccgctaccagcggtggtttgtttgccggatcaagagctaccaactctttttccgaaggtaactggcttcagcagagcgcagataccaaatactgttcttctagtgtagccgtagttaggccaccacttcaagaactctgtagcaccgcctacatacctcgctctgctaatcctgttaccagtggctgctgccagtggcgataagtcgtgtcttaccgggttggacccaagacgatagttaccggataaggcgcagcggtcgggctgaacggggggttcgtgcacacagcccagcttggagcgaacgacctacaccgaactgagatacctacagcgtgagctatgagaaagcgccacgcttcccgaagggagaaaggcggacaggtatccggtaagcggcagggtcggaacaggagagcgcacgagggagcttccagggggaaacgcctggtatctttatagtcctgtcgggtttcgccacctctgacttgagcgtcgatttttgtgatgctcgtcaggggggcggagcctatggaaaaacgccagcaacgcggcctttttacggttcctggccttttgctggccttttgctcacatgtatttcagaagcgatagagagactgcgctaagcattaatgagattatttttgagcattcgtcaatcaataccaaacaagacaaacggtatgccgacttttggaagtttctttttgaccaactggccgttagcatttcaacgaaccaaacttagttcatcttggatgagatcacgcttttgtcatattaggttccaagacagcgtttaaactgtcagttttgggccatttggggaacatgaaactatttgaccccacactcagaaagccctcatctggagtgatgttcgggtgtaatgcggagcttgttgcattcggaaataaacaaacatgaacctcgccaggggggccaggatagacaggctaataaagtcatggtgttagtagcctaatagaaggaattggaatatttaaataatgtatctaaacgcaaactccgagctggaaaaatgttaccggcgatgcgcggacaatttagaggcggcgatcaagaaacacctgctgggcgagcagtctggagcacagtcttcgatgggcccgagatccgataaccgtgctgggtaccgggacgtgaggcagcgcgacatccatcaaatataccaggcgccaaccgagtctctcggaaaacagcttctggatatcttccgctggcggcgcaacgacgaataatagtccctggaggtgacggaatatatatgtgtggagggtaaatctgacagggtgtagcaaaggtaatattttcctaaaacatgcaatcggctgccccgcaacgggaaaaagaatgactttggcactcttcaccagagtggggtgtcccgctcgtgtgtgcaaataggctcccactggtcaccccggattttgcagaaaaacagcaagttccggggtgtctcactggtgtccgccaataagaggagccggcaggcacggagtctacatcaagctgtctccgatacactcgactaccatccgggtctctcagagaggggaatggcactataaataccgcctccttgcgctctctgccttcatcaatcaaatcatgtacaggaacttaataattgctactgcccttacttgcggtgcatacagtgcctacgtgccttccgaaccatggagcacactgacacctgatgctagccttgaaagtgccctcaaagattactcacaaacttttggaatagctattaagtccttagatgccgacaagattaagagagacgtcaaatctggtgttgctgttggaggacttgcaggatatccaggacctgccggaccacctggaccaccaggcccaccaggcacctcaggccatccaggctccccaggatcacctggatatcagggaccaccaggcgagccaggacaggccggaccagcaggaccaccaggtccaatcggaaacgtgggcccttcaggcccagccggaaaagacggagagagtggccgtccaggaaggccaggagaaaggggactgccaggaccacctggcatcaaaggccctgccggaataccaggattcccaggcatgaaaggacatcgtggattcgacggaaggaatggagagaaaggcgagaccggcgccccaggactcaaaggcgagaatggcctgcctggagagaatggagccccaggaccaatgggccctcgtggagccccaggcgaaaggggacgtcctggactgccaggagccgcaggcgcccgtggcaatgacggcgccaggggaagtgacggccagcctggaccaccaggcccaccaggaacagctggattcccaggatccccaggcgccaaaggcgaggtaggaccagcaggatcaccaggcagtaatggcgctccaggacagcgtggagagccaggaccacaaggacatgccggcgcccagggcccaccaggaccaccaggaatcaatggcagtccaggcggcaaaggagagatgggcccagccggaatcccaggagccccaggattgatgggagctcgtggcccacctggacctgctggcgccaatggcgccccaggattgaggggcggcgcaggcgaaccaggcaaaaatggcgctaaaggagaaccaggacctcgaggcgagcgtggcgaagccggcatccctggcgtacctggagccaaaggagaggacggaaaagacggaagtccaggagagccaggcgcaaatggactgcctggagccgcaggagagcgtggcgctccaggattcaggggaccagccggacctaatggaatccctggagagaaaggcccagccggagaacgaggcgcccctggaccagcaggaccacgtggagccgccggagagccaggacgtgacggagtcccaggaggccctggaatgcgtggaatgccaggaagtcctggaggacctggaagtgacggaaaacctggaccaccaggaagtcagggagagagtggcaggcctggcccaccaggaccttcaggcccaaggggccaaccaggcgtcatgggattcccaggcccaaaaggaaatgacggcgccccaggcaaaaatggagagaggggcggaccaggaggaccaggaccacaaggcccaccaggaaaaaatggcgagacaggaccacaaggaccacctggaccaacaggaccaggcggcgacaaaggagacaccggaccaccaggccctcagggactccagggactgccaggcaccggcggcccacctggagagaatggaaaaccaggagagcctggccctaaaggcgacgctggcgcaccaggagcccctggaggaaaaggcgacgccggcgctccaggcgagcgaggaccaccagcaattgctggtattggtggtgaaaaggccggaggcttcgccccatattacggctaatcaagaggatgtcagaatgccatttgcctgagagatgcaggcttcatttttgatacttttttatttgtaacctatatagtataggattttttttgtcattttgtttcttctcgtacgagcttgctcctgatcagcctatctcgcagctgatgaatatcttgtggtaggggtttgggaaaatcattcgagtttgatgtttttcttggtatttcccactcctcttcagagtacagaagattaagtgagacgttcgtttgtgctccgga
